United States Patent Application Publication US 2013/0309769 A1 - sequence listing, part 7

SEQ ID NO: 7005 - DNA, 3156 bp, Homo sapiens
tctaatgcacgacagattcctttcagacaggacaactgtgatatttcagttcctgattgtaaatacctcctaagcctgaagattcctttaaaaaaaaaccaataccaaagaagcctacaatgttggccttagccaaaattctgttgatttcaacgttgttttattcacttctatcggggagccatggaaaagaaaatcaagacataaacacaacacagaacattgcagaagtttttaaaacaatggaaaataaacctatttctttggaaagtgaagcaaacttaaactcagataaagaaaatataaccacctcaaatctcaaggcgagtcattcccctcctttgaatctacccaacaacagccacggaataacagatttctccagtaactcatcagcagagcattctttgggcagtctaaaacccacatctaccatttccacaagccctcccttgatccatagctttgtttctaaagtgccttggaatgcacctatagcagatgaagatcttttgcccatctcagcacatcccaatgctacacctgctctgtcttcagaaaacttcacttggtctttggtcaatgacaccgtgaaaactcctgataacagttccattacagttagcatcctctcttcagaaccaacttctccatctgtgacccccttgatagtggaaccaagtggatggcttaccacaaacagtgatagcttcactgggtttaccccttatcaagaaaaaacaactctacagcctaccttaaaattcaccaataattcaaaactctttccaaatacgtcagatccccaaaaagaaaatagaaatacaggaatagtattcggggccattttaggtgctattctgggtgtctcattgcttactcttgtgggctacttgttgtgtggaaaaaggaaaacggattcattttcccatcggcgactttatgacgacagaaatgaaccagttctgcgattagacaatgcaccggaaccttatgatgtgagttttgggaattctagctactacaatccaactttgaatgattcagccatgccagaaagtgaagaaaatgcacgtgatggcattcctatggatgacatacctccacttcgtacttctgtatagaactaacagcaaaaaggcgttaaacagcaagtgtcatctacatcctagccttttgacaaattcatctttcaaaaggttacacaaaattactgtcacgtggattttgtcaaggagaatcataaaagcaggagaccagtagcagaaatgtagacaggatgtatcatccaaaggttttctttcttacaatttttggccatcctgaggcatttactaagtagccttaatttgtattttagtagtattttcttagtagaaaatatttgtggaatcagataaaactaaaagatttcaccattacagccctgcctcataactaaataataaaaattattccaccaaaaaattctaaaacaatgaagatgactctttactgctctgcctgaagccctagtaccataattcaagattgcattttcttaaatgaaaattgaaagggtgctttttaaagaaaatttgacttaaagctaaaaagaggacatagcccagagtttctgttattgggaaattgaggcaatagaaatgacagacctgtattctagtacgttataattttctagatcagcacacacatgatcagcccactgagttatgaagctgacaatgactgcattcaacggggccatggcaggaaagctgaccctacccaggaaagtaatagcttctttaaaagtcttcaaaggttttgggaattttaacttgtcttaatatatcttaggcttcaattatttgggtgccttaaaaactcaatgagaatcatggtaaaaaaaaaaagttaaccaaagaatatacctgtacataatttgtacagttttaagttgttagataggaactggatttcttatgtattagacattattgctcaatcataatggaatagattctgcatccctaaatgtatgaaccataaggttaaaaaagatgaatggaaatatcaaacaactttttactgagcatcagtttcataatcaataatataagaagattaatttggattctagtatgtttcagtttgtttttaattaccaccttcctttggtagaaaaaatatgttccttgatgtaggaaagtctaggttttagagattagaggatgagatcaagagttaaattcctaaagaagcactgaatatatgaagagagcaaacaaatcaagtaccaacctagaggctttatttttgaattgattcatggtgtgtgtgtgtgtgtgtgtgtgtgtgtgtgtgtgtgtgtaacacagaaacagcttcagaaaataagggatagaaagtaatgaagaaagtacttaccccatattgccataaaaatagcaaagaagactgtccctccattatcgaacaaatatgtcacctgagtagaaaacaaacagaaatattagtcatgcaaattgattataataagccagtgaatactgtttgcactcaggtactatgattttttctcaaatagaatcatattattttatagtacagaaatattatatatgaattcctttcatgggtcttgcaacaatttcacatgatttttctcatggggagaggtgaagaaacaacattagccctcttctctcctctcttgattccctttataccccaccatcatttctgattataaataattctaccattctatggaagtatttgtgggtcacagattgtcaaactacttaatgaaagttgtatgaaattagtttttcaggtgaggcattcctagttgcaattcctgttagcaaaacttctaggagtggggaagttggaaaatgcaggattcttccagtgagccagcatttcccatagctaaccctattctcttagtctttcaaaatgtagaatgggtccaataatggctataagatgtaataaatcccatcttaatttgttttaaaagtttcataaatcactgaacacttatgaaacaaagtgttttttaatcagatatcaactgaaacttcataaaggatgcatagttttataatgttattgaatcaaattttaaggcttgtattgtttgattttaataaagtataaattcaattt

SEQ ID NO: 7006 - DNA, 1124 bp, Homo sapiens
aacagacacgcgaggtcaggaagaagccgcttataaattaccgcttccttcgcgccgccgccaacgccgagccccgaggaccgcaagcccagaggacaagctgcgccaagagggagtgctggagctgttcacccagcgggtcagagagcgagccgggcaggccagcccccggccggcggaaccctggcacagcctgagcagatgctgcgggcggcgccgcagccaccccagatccagaaccagaaccacagcccttctgaggagctcccaaacaaagcaaggagatggccaccaaggagaagctgcagtgtctgaaagatttccacaaggacatcctgaagccctcaccagggaagagcccaggcacgcggcctgaggacgaggctgagggaaaacctccgcagagggagaagtggtctagcaagatcgactttgtgctctctgtggctggcggcttcgtgggcttgggcaacgtctggcgcttcccgtacctctgctacaagaatggtggaggtctcaggcccctttgggactgtgatgagtgtcctagacgctccccagaacaaagcacatacactagacccaagttgcccacagtttcaaagggtttatggacccgctgaagccattagtggacaccaggtgcgtttctcataccgtattttattttcctgtttgggagcggcctgcctgtgtttttcttggagatcatcataggccagtacacctctgaagggggcatcacctgctgggaaaagatctgccccttgttctctggtatcggctatgcctccgttgtaattgtgtccctcctgaatgtctactacatcgtcatcctggcctgggccacatactacctgttccagtccttccagaaggagctgccctgggcacactgcaaccacagctggaacacacctcactgcatggaggacaccatgcgcaagaacaagagtgtctggatcaccatcagctccaccaacttcacctcccctgtcatcgagttctgggagcgcaacgtgctgagcttgtcccctggaatcgaccacccaggctctctgaaatgggacctcgctctctgccttcttttagtctggctagtgtgtttcttctgcatctggaag

SEQ ID NO: 7007 - DNA, 8198 bp, Homo sapiens
gcccgctcgccctcctgcgccctcccgcgcccccctccccgccttttttgaaaaagcattttaccaccaaccaccaccccaatccaacccacaccgaaccttcgcgcaccccctacaccccaacaacaacaacaactgcaaaatagaaaacaaatccccaaacccaggcgaaaagcagccaacaccggcggcggcggcggcctcggcaagcacggccagcgcgctcggactgcaagagggttaaaagtgtagattggatttcacccctggaaatctagcacgccgagtgaacttgaatctttggctatttaaggaggactgggtttgttgtgaagttgcggtgatccagcgcagagccccgtcctgattgatcgcatcgcggggctcagatgactgtaaaatgaatagatgaaattcttgcttctcgaagattttcttgggcatctcccggaaagtgcgttttaaggcgaagtcatgatgtattctcccatctgtctcactcaggatgaatttcacccattcatcgaggcacttcttccacatgtccgtgcaattgcctatacttggttcaacctgcaggctcgaaaacgcaagtactttaaaaagcatgagaagcgaatgtcaaaggatgaagaaagagcagtcaaagatgagcttctcagtgaaaagcctgaaatcaaacagaagtgggcatccaggctccttgccaaactgcgcaaagatattcgccaggagtatcgagaggactttgtgctcaccgtgactggcaagaagcacccgtgctgtgtcttatccaatcccgaccagaagggtaagattaggagaatcgactgcctgcgacaggcagacaaagtctggcgtctggatctagtcatggtgatcctgttcaaaggcatccccttggaaagtaccgatggagagcggctcatgaaatccccacattgcacaaacccagcactttgtgtccagccacatcatatcacagtatcagttaaggagcttgatttgtttttggcatactacgtgcaggagcaagattctggacaatcaggaagtccaagccacaatgatcctgccaagaatcctccaggttaccttgaggatagttttgtaaaatctggagtcttcaatgtatcagaacttgtaagagtatccagaacgcccataacccagggaactggagtcaacttcccaattggagaaatcccaagccaaccatactatcatgacatgaactcgggggtcaatcttcagaggtctctgtcttctccaccaagcagcaaaagacccaaaactatatccatagatgaaaatatggaaccaagtcctacaggagacttttacccctctccaagttcaccagctgctggaagtcgaacatggcacgaaagagatcaagatatgtcttctccgactactatgaagaagcctgaaaagccattgttcagctctgcatctccacaggattcttccccaagactgagcactttcccccagcaccaccatcccggaatacctggagttgcacacagtgtcatctcaactcgaactccacctccaccttcaccgttgccatttccaacacaagctatccttcctccagccccatcgagctacttttctcatccaacaatcagatatcctccccacctgaatcctcaggatactctgaagaactatgtaccttcttatgacccatccagtccacaaaccagccagtcctggtacctgggctagcttggttcctttccaagtgtcaaataggacacccatcttaccggccaatgtccaaaattacggtttgaacataattggagaacctttccttcaagcagaaacaagcaactgagggaaaaagaaacacaacaatagtttaagaaattttttttttaaataaaaaaaaaggaaaagaggaagactggacaaaacaacacaaaggcagaaaggaaagaaactgaagaaagaagataatagaccagcaattgcagcacttacaatcactaattcccttaaggttgaaactgtaatgacataaaaagggtcgatgatatttcactgatggtagatcgcagcccctgcaacgtagcctttgttacatgaagtccgctgggaaatagatgttctgtctctatgacaatatattttaactgactttctagatgccttaatatttgcatgataagctagttttattggtttagtattcttgttgtttacgcatggaatcactattcctggttatctcaccaacgaaggctaggaggcggcgtcagaggtgctgggtgacagagccatgagccagccattttataagcactctgatttctaaaagttaaaaaaaatatatgaaatctctgtagcctttagttatcagtacagatttattaaatttcggcccttaacccagccttttccagtgtgtaacccagtttgaaatcttaaaaaaagaaaaaatgaaaaaaaaaggaaaaaaagaaaaaaggaaaaaaacagtttgaacacaaaggctctatggaagaaatgcctctatgtaggtgaagtgttctctctgcatgcaacagtaaaaattaatataatattttccccacaaaagaaacacttaacagaggcaagtgcaatttataaatttatatctaaaggggaatcatgattataagtccttcagcccttggactctaaattgaggggattaaaaagaatttaaaataattttgaacgaatttattttcccctcagtttttgagggcattaaaaaggcattaaatcaagacaaatcatgtgcttgagaaaaataaaattaatgaaaacacagcacttatgttggtttagctgcagcctccttggaggtagaatttatttatttaaaattactggttgcatcaagaacccatagggtgtacaaaaggttctataaaatctgcattatagagacaaagaggcaggcaaatccatgtcacaagggtaaagcttacagtttacaaactgggaacgccagggtgtaggatataaaaacgcactcttgagaaaacaaatgtaatcagggtgctgaaaacttgcatggtgctttcagacattagccttgttcaacaaatttcttgtattgacagatccatagtgtgcatgggcagacacattttgcctctatgtctcttaaaattttaattaaaaatactctttccagtaatcctaatttgcacgaagatataatgtccacattacgtgccttgccttgaaatctaaaaaacaaaaaacaaaaaaaaaaaaacaaaaaaatacaacaaagtgacatcactacacttgttttgctgcatttattatcattttaaatctttaccatttttatgacaaaatattttgtactccagacgaagaaaaatgtgtgacatcatggattttttagacagttatacctttatctcacatttataaagcatatcatggctgtgtatagttgccgcttaaaaattgtaatcgaccagcaatattttcagtattttggtgtttttttctattaacctttcatgtttttcatcttccaattaatatttgggggggaggggtttcaaatttatacgaattatgcaataccaagttttgcctatgtaggtagtgcttttagctgtattggttattataggtaagtacacagatttaaaaaaaaaataatgtatgcttttttgtttgtttgtttgttttaattgaccaaagtgggtactgctatttttgcagtgtgatgaggtccttttgtgtactgagagatggacaggggattttttttaatatacatatatatatattctggggtgggtgggaggatttttaacactttgcagtgtagctgtgaagcagtgcaccctgagatgggcctgggctgcaaagcgactgttctgcctactgtgacaaacttcaacttacacaggttcccctctctaacttcccacctgggttgcaagctgaactcattactggttttcataacaacacaatagtaagaacaagcaaacacaacaaattctcctggaggcagacttggcttaaaaaggcagacttggcttggtgatagtttttcttgaaagttccagatccacagtggagagtgagcctgtctcatatttggcaaaaatatttgttgaaatgtccacataggggatgttggatgtttaacacttttgagagtttaacacatgaatattctttctcctagaaaacacattagacctgttggagggagtctcccgtattccttttctgccacttttcgtccccatttcatttcattaatgataggatatgatttacctgtgacttactacttcaaatggatggcagtgcacttggatttttttttaatatccagaagattgaacagagggttgctattgttgaatgtatttggactgatagattaaaatcaaagttcaatttttaaggaacaaaaaagtaaatcctgttttcattttatctccccttttaaaactgagaaccagagcagaagggaaatatagaattttaagcaattaatcttcctgtggatgaattaaacccattagatgctgatgggatttttttaaggaatggtaccttaactatatatttgatttcgtttcccctgagggctagaggctgaatggaggctggttttattttgcctttccctcaccgcccagtcccattgagtgtattcattactagaaggaaaatctttcagaattggtgacacatggtaggctgtcttaaggagtcccctggcccccttcccctaggccatggcctaataaaataaactgtcaattgttctcacagcatatcatttaataatgaatactttagaacaatgcttatgggctggagaattgtatttgattagcccattcagtttgatagcccaaatgctgaacagcacagcgggatcctagcagtgcaagttcaaaagtaagtccaatcatttctgtgatactcgccctggtagcaaacagatcatctcagccaagctcttcatgtatctttgacctattaggtgaacaaatgaacctcacaggacacacagtattttttaaaggcagactcgctctcttttttgccagtgagcagttctagctaaccaagttacacactgtgggtattcctgcctgcctcttgaatacaaaggcctagttcaagtgttgctttttttatttcaaatcaattttttcttctttcctttttgagataaaactattaaaagtactactatatatataaaatctcaaatcaacttttcggcctcctcctcgtgtaccaggaagtatattctgacgaagggccccacttttgcaggtcttgcacgcccctcccttacccagaactgcagagcttcaggatggcgaaggtcacccaagggcatgagtagggagtggtgtctccaaccatcagttccgtggcactgttcagcctttgtgtgctgccctgccacccaccactcacagtgcctctgaagcgtgttacccctggagtgacgtgagcatttgaggcttgtctaaggaaaaaaataaaaggcagtgaaggagactgtacataaagacatggcaaaaatcttaattatagcaatatagttatcgggtaatgttcgggtgggcagctccattaaaaaatatgtgaatgaatctgtgaagctgcaagtagcgagaagagcgaaaggtcttcttaatgaaccgcctaccttgtagacagtaatttgtacactgtatagttttgttaagaattttttttaaattaaaattcccatgtttgtaaagctaactttttaacaattataatggaactatatgttgtttccatttttaaagtaaacaagaatattccttgtttagagactggacttgagttaaaactctccagtctcttaagttatgtattaaaaagaaaatctgtccatgttaggagttatttcacagattcctgtgcttgaaaagcataggatactaatcctttaaaaaagtgtaaatggagaaaagttatattttatgaaggttattttgttgtatttagtattggaaaagttggtttccagagcatttcagaatgtcgaagcaccactgtctttttattagtatatacggcctttagcaaaagtttttgtgattgttacgtgatggtatttaaggttaagtttcacagagcattcaggataggcagaaaactaaaacagtgctatgtctcacataacgtgtcctcagggagcagaatcttggatttgtgacttgtagcttcataaggactcaacgaaagagattgcacagggacatcttcagcggtgtgacagcaggacatgttctttacctagattcaaattctatgtactgtgtgaaatgatgaaggctgcagaaagttatcccatattcagtgtacagtattcatttttaatgaaacaactctacaatattgctggcagataggccccaagcatgacattcaatatagtttacatgttcctgtcaaggtcttttgttaacattaaccagctgcatgctttctggactttaagaaattgggtttctatagaaaactttttttttttttttttttttaatgtgcaggctattcaagttcaatagtaaaagctcaaaaatgaatgttctactccatgctgaaggagctgaaagctgccttcttcatattttgcactttctggtagttcccctgttttttctaattccctaaaattgtgtgggtggagtggagccctgcagttggggggtaacatggaccactgattttgccctttgaccctgcacaatgacctttgcatcagccaaactcattgccatgacaactctttgtactgtgtccgtgccacagatctgttggtcacattgttaatagtaaaggggacaagttggagacggtcaatttttacattttttgttgcaattttttcttcaatggttgtaagtagtttttttttttttttaataataaaagggttcactagttaatactctagaaatatctgtgtgttgcaattcaaatgtatgttgagattgtgaaaagcgcttcagtgccactagcttaccggtacactagactaagcccttgatgacttattgcatgatacagtaccaggaacaacaggtggcctaaatacatgaaaagcagtgtaagctagtgacactaaagccagtcttgtattactgtatttttgacagaatggttttgaaaactgtgctacagggactgatgtggcaaatatatctctttatgcagaaggaagtctttttttttcttttttttttttttaagaagtatggctttttatgcatccttcatcgagggcattgaagttgcatggactgataaaagttgatgcaaaacaagaaagaaacaaacaaaaaaaaaaaaccagcaaaatgtttaccaaaaaactcaaacaaatgagcagtgcctgttcaatttcacagtctctgttgagttcagttgtaaatatgtttcaaatgacattttcttgggaaaaaaaatctctacaacattgtagaatgtgaggggtaactacatcccaggcataggtttctcaaagctgcagtagattatgtcttcatcaagctgttaatttgtgcttatatcatatagaacttttagcatcctgggaagagctgcccccacctcaatgatatttctctgagaacaacttttgtaggactgtgtgtttctttagatacatttagtacaactgtaggtgacgagtagtcagttattgcttgctagctacacaccagggttgatccattttaaaacttttggcattttgtcctcatgggccataaatacagaaccttgtattttaattaaatttttttacaaaaggaggcacatgcacaatctccatgtaacaaacctttagcagtaggatgtattatacgacagttacttaatttctagagttcaggcctctgggatcaaccccagactgggccagaatgttagtgaaggttttattgtgcccggttggaggataacgttctttgggtactttttgtgggttgcaaatgaactcaattgccacaagttttaaactggtgtaaatcaagcttgacttaatgtgattgttactgttatatccagcctatactgctagcagctgctcatactgcagtcaattactggaagcggatatatttcctatgcaaaaactgtttaaacaataaaatgagctatgctacaga

SEQ ID NO: 7008 - DNA, 3996 bp, Homo sapiens
ctagtgcagtgcctggagatgaccaccaaacggaaaatcatcggccgtctggtgccatgccgatgtttccgaggtgaagaagaaatcatctcagttttagattactcccactgcagtcttcagcaggtgccaaaggaggtctttaacttcgaacgaacattagaggagctttatctagatgccaatcaaattgaagaactacccaagcaattgttcaactgtcaagctctacgaaaactaagtattcctgataacgacctttcaaatctgccaaccactattgctagtttagttaatcttaaagaactcgacatcagtaaaaatggtgtacaagaatttccagaaaacataaagtgctgtaagtgtttaacaattattgaagccagtgtcaatcccatttctaaactacctgatggcttcacacagctcctaaacctgacccagctctacctgaatgacgcctttcttgaatttcttccagccaattttggaagacttgtcaaattgcggatcttggagttaagagaaaatcacttgaaaactctaccaaagtcaatgcacaaactggcccagttggaaagacttgacctaggcaataatgaattcggtgagctgcctgaagttctggatcaaatacaaaatttgagggagttatggatggataataatgcattacaagtgttacctgggtctatagggaagttaaagatgttggtatacctggatatgtcaaaaaacagaatagaaacagttgacatggacatttctggatgtgaagcccttgaggacctcttattgtcatccaatatgttgcaacaattgcctgattctataggacttttgaaaaaactaacaactctaaaagtagatgacaatcaacttacaatgctacccaatacaattggaaatttatctttattagaagaatttgactgtagctgtaatgaactggagtcactaccttctactattggctaccttcatagtcttcggacattagcagttgatgagaatttccttccagaattacccagagaaattggaagttgtaagaatgtaacagtcatgtctctacgctccaacaaattagaatttcttcctgaagagattggacagatgcagaaactaagagtcctaaatttgagtgacaacagattgaagaatttaccattctcatttaccaaacttaaagagcttgcagctttgtggctttctgacaatcagtccaaagcccttatccctttacaaacagaagcccatccagaaacaaagcaaagagtattgactaactacatgtttccccagcagcctcgtggtgatgaagatttccagtcagacagtgacagctttaaccctacactgtgggaagagcagagacaacaacgcatgactgttgcctttgaatttgaagacaaaaaagaagatgacgaaaatgctgggaaagttaaggattgcaccatctttcccacagcctcttgattcaaagccattactcagccagcgggaggctgttcccccaggcaatataccacagcgtcctgaccggctgcccatgagtgatactttcactgacaactggactgatggctcgcattatgacaacacagggtttgttgctgaggaaaccacagccgagaatgccaacagtaatcctctcttaagttcgaaatctagaagcacatcttcgcatggacgcaggcctttgatcaggcaagacaggattgttggtgttcccctggaactcgagcagtctacacacagacacacaccagaaacagaagtgcctccttccaatccttggcagaattggaccagaacccctagtccgtttgaagacaggaccgcttttccttccaaattagagacaacccccactaccagcccattgcctgaaaggaaagaacatataaaggaatctactgaaatacctagtcctttttctccaggcgtaccatgggagtatcatgattccaatcccaacaggagtcttagtaatgtcttttctcaaatccactgccgcccggaatcttctaaaggtgttatttcaattagcaaaagcacagagaggctttcccccctaatgaaagatatcaagtctaataaattcaaaaagtcacagagtatcgatgagattgacattggtacatataaggtgtataacataccattagaaaactatgcttctgggagtgatcacttaggaagccacgaacgaccggataagatgctgggaccagagcatggtatgtccagtatgtctcgaagccagtcagtcccaatgctggatgatgagatgctcacctacggaagtagtaaggggccacaacaacaaaaagcttctatgacaaaaaaagtctatcagtttgaccaaagcttcaatcctcaaggatcagtggaagtgaaagccgaaaagaggataccacccccttttcaacacaatcccgagtacgtgcaacaggccagcaaaaacatcgccaaggatttgattagtcctagagcttacagaggatacccaccgatggagcaaatgttttcattttctcagccatctgtgaatgaggatgctgtggtgaatgcccagttcgcaagccaaggggccagggcgggcttcctgagaagggccgactccctggtgagcgccacagaaatggccatgtttagaagggtcaatgagcctcatgagctgcccccaactgataggtacggcagacccccatataggggagggctggatcgccaaagcagcgttacagtgactgagtcccagttcctgaaaaggaatggcaggtatgaagatgaacacccttcatatcaagaagtgaaagctcaggcgggaagttttccggttaaaaaccttacccaaaggaggccattgtctgcgagaagctacagtacagagagttacggtgcctcccaaaccaggccagtttcagctaggcctactatggcagctcttttggaaaaaataccatctgactataacttgggtaactatggtgacaagccatcagataacagtgatttaaagacgaggcctactcctgtgaagggagaggagagctgtggtaaaatgcctgcagactggagacaacagctgcttagacatatagaagctagacggttagacaggaatgctgcttacaaacacaatacagttaaccttggcatgctgccctatggaggtatttcagcaatgcatgcaggcagaagcatgactttaaacttgcagactaagtctaaatttgatcatcaagaactacctcttcagaaaaccccgtcccagcaaagcaacattttagacaatggacaagaagatgtatctcctagtggccaatggaatccttatccacttgggaggcgggatgtacctccggacaccattactaagaaggcaggcagccacatccagacgttgatggggtcccaaagccttcagcatcgcagccgggagcagcagccgtatgaaggaaatataaacaaagtgaccatccagcaatttcagtcaccattgcctattcagatcccctcttcacaggccacccggggacctcagcctggacggtgcttaattcaaactaaagggcaaaggagtatggatggatatccagagcagttttgtgtgagaatagaaaagaatcctggccttggatttagtatcagtggtggaattagtggacaaggaaatccattcaaaccttctgacaagggtatctttgttactagggttcagcctgatgggccagcatcaaacctactgcagcctggtgataagatccttcaggcaaatggacacagttttgtacatatggaacatgaaaaagctgtattactactgaagagtttccagaacacagtagacctagttattcaacgtgagcttactgtctaaatattttttataaatagtgaagatacgtctagccagacctaatgttcaaaaataaatttatacatagaaacaaattttgccaattgctggaccaatggcaaacatta

SEQ ID NO: 7009 - DNA, 1753 bp, Homo sapiens
gctgttacctcttctggcgtccgtgcccgcggaagttcgctcctagggaagtcgctcgcgtcctcaagagcacctgagaggatctcggcgaagcggaaggctttggtgccagctgggagagtctgcgccggatttcctcagctccttggcgcgtttcctcggagccgggggaggcaaagcacggaccccggagtcggcgcccatagcgggacgccctcgcgaggggcgggagtgcgggagagccgagctgctgcccttgactggtgctcaggggaccacagctgcaatgacagtttgggcctgcaaaaagaaggctggaacaacgggagatggaagctttctgcaaatgcagcaccactggtatccatgaatttaacctgcccatcattcttcctaaacaagagactattgaaaagtcagggtgttcaaaatggcttcagatcttatcaggacaatcttggctgttgcactaatttccaaacttggcacagctgtagatgcagaactgatgccatctggtgcgattctacagaataagagagaaaatttacccagagtgtgccatgcactggcttttctgggaatggcaaggtgccaggatttgtttttggttcgcttgcaggggtggaaacttggaactaggttccaagatggtccccgcagcaccccacaagaagaaggaggaagcccacagagaaaacggggcatgccagttcaaatccacttccttttaaagagcttcctcagcagcccaataacttttgccttcatctcattggccagaactgtgtcattggctactgctatctgcaagattgtctgagaaatgtagtttttgtagctggatatataactgcctttgacaaaaatccagtttctcttgatgaagaagaagatgatggtggatcttgggaggacaactaacattttatgccctggctacagaatacagttgcagaggagcataaagttcaaaaagatcaaaactctagttccttcacaactgtcaaagctccaagcagcactgctcccctctgacagagtgagcagagtgaaggcatgtcaggtgttctcacaaaactcttgacagggctgacctctctcagtcaatatccttgtcccacatcaggattttctagagggccctgggtacctgtgcacttccttggtggccgtaacctctttgtggagggttggtgtaggataaagaatgttctattacgctgctccctcatctgtatcatttctctcctctctaattttcctgtcagttatattttggtggagtctgggtttgtgtatttgattcctatagaaagaccatcgctttcatgcatggaggaggggaatctacgcaaagaaaggctaccttactcctttctgtgactccaccaccagtctaggaatatcctgggagaagaattgcctctcaaagctgcttctataagcagcctacatcctagctaagcaaagaagaaacacttcccacatctagggctgtctaaaagaactttctgtgatgacagaaatgttctatatctgcagtgtccaatatggtaaccatataggcacatgtggctagtgaacacttgaaatgtggctagtgtgactgaggaaggaaaatttaaattttgtttaattgtaattaatttaaattcagatagccaaatggggctactagctattgtgttagatagcacggtatactttattctctttcttgtgttgtagaaccagctgggagaggtgtggg

SEQ ID NO: 7010 - DNA, 1788 bp, Homo sapiens
tggggaagtggggaaccgaggggcaaccaggggaagatggggtgctggaggagagcttgtgggagccaaggagcaccttggacatctggagtctggcaggaagttagcaaaggtgacatcttctcggggggagccgagactgcgcaaggctggggggttatgggcccgttccaggcagaaagagcaagagggcagggagggagcacaggggtggccagcgtagggtccagcacgtggggtggtaccccaggcctgggtcagacagggacatggcaggggacacaggacagaggggtccccagctgccacctcacccaccgcaattcatttagtagcaggcacaggggcagctccggcacggctttctcaggcctatgccggagcctcgagggctggagagcgggaagacaggcagtgctcggggagttgcagcaggacgtcaccaggagggcgaagcggccacgggaggggggccccgggacattgcgcagcaaggaggctgcaggggctcggcctgcgggcgccggtcccacgaggcactgcggcccagggtctggtgcggagagggcccacagtggacttggtgacgctgtatgccctcaccgctcagcccctggggctggcttggcagacagtacagcatccaggggagtcaagggcatggggcgagaccagactaggcgaggcgggcggggcggagtgaatgagctctcaggagggaggatggtgcaggcaggggtgaggagcgcagcgggcggcgagcgggaggcactggcctccagagcccgtggccaaggcgggcctcgcgggcggcgacggagccgggatcggtgcctcagcgttcgggctggagacgaggccaggtctccagctggggtggacgtgcccaccagctgccgaaggccaagacgccaggtccggtggacgtgacaagcaggacatgacatggtccggtgtgacggcgaggacagaggaggcgcgtccggccttcctgaacaccttaggctggtggggctgcggcaagaagcgggtctgtttctttacttcctccacggagtcggcacactatggctgccctctgggctcccagaacccacaacatgaaagaaatggtgctacccagctcaagcctgggcctttgaatccggacacaaaaccctctagcttggaaatgaatatgctgcactttacaaccactgcactacctgactcaggaatcggctctggaaggtgaagctagaggaaccagacctcatcagcccaacatcaaagacaccatcggaacagcagcgcccgcagcacccaccccgcaccggcgactccatcttcatggccaccccctgcggcggacggttgaccaccagccaccacatcatcccagagctgagctcctccagcgggatgacgccgtccccaccacctccctcttcttctttttcatccttctgtctctttgtttctgagctttcctgtctttccttttttctgagagattcaaagcctccacgactctgtttcccccgtcccttctgaatttaatttgcactaagtcatttgcactggttggagttgtggagacggccttgagtctcagtacgagtgtgcgtgagtgtgagccaccttggcaagtgcctgtgcagggcccggccgccctccatctgggccgggtgactgggcgccggctgtgtgcccgaggcctcaccctgccctcgcctagtctggaagctccgaccgacatcacggagcagccttcaagcattccattacgccccatctcgctctgtgccc

SEQ ID NO: 7011 - DNA, 998 bp, Homo sapiens
cagatccctaaagaagtggctgacatctttaacgcccccagtgatgatgaagagtttgttggcttccgagatgatgttcccatggaaaccctctcgtcagaggagagctgcgatagttttgactcactagagtcagggaaacaggtcgtggagtcagatttgagtgatgatggcaaagcatctttggtgagcgaggaagaggaagatgaagaagaagataaggctacccctagaagaagcaggtctagaagaagtagtattggtcttcgagtagcctttcagttccccaccaagaagctggccaacaaaccagataaaaacagttcttccgagcagttgttttctagcgcacgcttacagaatgagaaaaaaacaattcttgaaagaaagaaagactgtagacaggtgatacaaagggaagattctacctctgagtctgaggatgactctcgggatgagagccaggagagttcagatgctttgctgaaaaggaccatgaacatcaaggagaacaaagccatgcttgcccagttattggcggaattgaactcgatgccagatttcttcccagtacgaaccccaacctcagcttctaggaagaagacagtgaggcgggccttctcggagggacagatcacgcggcgtatgaacccaacccggagtgcgcggcctcctgagaagtttgctctagagaacttcactgtctcagccgctaaatttgcggaagagttttacagcttccgaagaaggaagacaattggggggaaatgccgggagtacagacgacgtcaccgtatatcttcttttcggccagtggaggatatcaccgaagaggacttagaaaatgttgccataactgttcgagataaaatctatgataaagttctgggtaacacgtgccatcagtgtcgacaaaagaccatcgacaccaagacagtgtgtcggaaccagggttgctgtggtgtgcgaggacagttctgtggaccatgcctgcggaa

SEQ ID NO: 7012 - DNA, 524 bp, Homo sapiens
acaaccaacacgttctccccacacgactctctcgttctccccacagccaggtctccagctggggtggacgtgcccaccagctgccgaaggccaagacgccaggtccggtggacgtgacaagcaggacatgacatggtccggtgtgacggcgaggacagaggaggcgcgtccggccttcctgaacaccttaggctggtggggctgcggcaagaagcgggtctgtttctttacttcctccacggagtcggcacactatggctgccctctgggctcccagaacccacaacatgaaagaaatggtgctacccagctcaagcctgggcctttgaatccggacacaaaaccctctagcttggaaatgaatatgctgcactttacaaccactgcactacctgactcaggaatcggctctggaaggtgaagctagaggaaccagacctcatcagcccaacatcaaagacaccatcggaacagcagcgcccgcagcacccaccccgcaccggcgactccatcttcatggccac

SEQ ID NO: 7013 - DNA, 2538 bp, Homo sapiens
ggtcaggaaagctcaggcaagcccaccctcaggcactacagctagactccgagcttactgggcagtcatctgattcgaccaacatcagttcgcagggcttaagcccagtcccttacggcggcctggggagggaccaggcccaagtatataaagctccctgagggtccgcgttggctttgcgcctgtgagtgtgattcaagaacgtcccagtgcccttggctcctttcggagtgtgaccccgtgcttgcacgggacacgttacccagctcgggtgagaagggtatcttccgggaacctcgcctttaatagcacaacgagcgcagagtccactggatctgcgagaagaaaccgcgctaactagtttgtccctacggccgcctcgtagtcactgccgcggcgccttgagtctccgggccgccttgccatggctgcccgtggtgtcatcgctccagttggcgagagtttgcgctacgctgagtacttgcagccctcggccaaacggccagacgccgacgtcgaccagcagagactggtaagaagtttgatagctgtaggactgggtgttgcagctcttgcatttgcaggtcgctacgcatttcggatctggaaacctctagaacaagttatcacagaaactgcaaagaagatttcaactcctagcttttcatcctactataaaggaggatttgaacagaaaatgagtaggcgagaagctggtcttattttaggtgtaagcccatctgctggcaaggctaagattagaacagctcataggagagtcatgattttgaatcacccagataaaggtggatctccttacgtagcagccaaaataaatgaagcaaaagacttgctagaaacaaccaccaaacattgatgcttaaggaccacactgaaggaaaaaaaaagaggggacttcgaaaaaaaaaaaagccctgcaaaatattctaaaacatggtcttcttaattttctatatggattgaccacagtcttatcttccaccattaagctgtataacaataaaatgttaatagtcttgctttttattatcttttaaagatctccttaaattctataactgatcttttttcttattttgtttgtgacattcatacatttttaagatttttgttatgttctgaattcccccctacacacacacacacacacacacacacacacacgtgcaaaaaatatgatcaagaatgcaattgggatttgtgagcaatgagtagacctcttattgtttatatttgtaccctcattgtcaatttttttttagggaatttgggactctgcctatataaggtgttttaaatgtcttgagaacaagcactggctgatacctcttggagatatgatctgaaatgtaatggaatttattaaatggtgtttagtaaagtaggggttaaggacttgttaaagaaccccactatctctgagaccctatagccaaagcatgaggacttggagagctactaaaatgattcaggtttacaaaatgagccctgtgaggaaaggttgagagaagtctgaggagtttgtatttaattatagtcttccagtactgtatattcattcattactcattctacaaatatttattgaccccttttgatgtgcaaggcactatcgtgcgtcccctgagagttgcaagtatgaagcagtcatggatcatgaaccaaaggaacttatatgtagaggaaggataaatcacaaatagtgaatactgttagatacagatgatatattttaaaagttcaaaggaagaaaagaatgtgttaaacactgcatgagaggaggaataagtggcatagagctaggctttagaaaagaaaaatattccgataccatatgattggtgaggtaagtgttattctgagatgagaattagcagaaatagatatatcaatcggagtgattagagtgcagggtttctggaaagcaaggtttggacagagtggtcatcaaaggccagccctgtgacttacactgcattaaattaatttcttagaacatagtccctgatcattatcactttactattccaaaggtgagagaacagattcagatagagtgccagcattgtttcccagtattcctttacaaatcttgggttcattccaggtaaactgaactactgcattgtttctatcttaaaatactttttagatatcctagatgcatctttcaacttctaacattctgtagtttaggagttctcaaccttggcattattgacatgttaggccaaataattttttttgtgggaggtctcttgtgcgttttagatgattagcaataatccctgacctgttatctactaaagactagtcgtttctcatcagttgtgacaacaaaaatggttccagatattgccaaatgccctttagaggacagtaatcgcccccagttgagaaccatttcagtaaaactttaattactattttttcttttggtttataaaataatgatcctgaattaaattgatggaaccttgaagtcgataaaatatatttcttgctttaaagtcccca

SEQ ID NO: 7014 - DNA, 1341 bp, Homo sapiens
acagctgctggccctctcctggtgccattcaccctcaacttcaccatcaccaacctgcagtacgaggaggacatgcatcacccaggctccaggaagttcaacaccacggagcgggtcctgcagggtctgcttggtcccatgttcaagaacaccagtgtcggccttctgtactctggctgcagactgaccttgctcaggcctgagaagaatggggcagccactggaatggatgccatctgcagccaccgtcttgaccccaaaagccctggactcaacagagagcagctgtactgggagctgagccagctgacccatggcatcaaagagctgggcccctacaccctggacaggaacagtctctatgtcaatggtttcacccatcggagctctgtggcccccaccagcactcctgggacctccacagtggaccttgggacctcagggactccatcctccctccccagccccacaacagctgttcctctcctggtgccgttcaccctcaactttaccatcaccaatctgcagtatggggaggacatgcgtcaccctggctccaggaagttcaacaccacagagagggtcctgcagggtctgcttggtcccttgttcaagaactccagtgtcggccctctgtactctggctgcagactgatctctctcaggtctgagaaggatggggcagccactggagtggatgccatctgcacccaccaccttaaccctcaaagccctggactggacagggagcagctgtactggcagctgagccagatgaccaatggcatcaaagagctgggcccctacaccctggaccggaacagtctctacgtcaatggtttcacccatcggagctctgggctcaccaccagcaccaccggccctctcctggtgccattcacactcaacttcaccatcactaacctacagtatgaggagaacatgggtcaccctggctccaggaagttcaacatcacggagagtgttctgcagggtctgctcaagcccttgttcaagagcaccagtgttggccctctgtattctggctgcagactgaccttgctcaggcctgagaaggatggagtagccaccagagtggacgccatctgcacccaccgccctgaccccaaaatccctgggctagacagacagcagctatactgggagctgagccagctgacccacagcatcactgagctgggaccctacaccctggatagggacagtctctatgtcaatggtttcacccagcggagctctgtgcccaccaccagcactcctgggactttcacagtacagccggaaacctctgagactccatcatccctccctggccccaca

SEQ ID NO: 7015 - DNA, 538 bp, Homo sapiens
tagaagattccaagcaagaaagtattcagcagtggctggactctggattctttgtctctgcaaatgaaaactttcaacaagtcattgaccgcactggtaagacaagagaagcagttatgctttgggaagctgagtaggagatatattcaaatatctacgtgaataaatcttcttaaaatgagcattatcagaggcttctagaaatgatcagccctcaaaaactatccagctcaatctcttcatttgacatatgactgcgacaaaaatgataggtgcttccccagcagcaggttaagggccgaacccagggctcttgccatatcatcaatggctcagagtatagcataaactcactgggttctatgaagacatttgcaaggatgtagttatgaaaatgaaattgtttaattttccccatcctgtattatacttttatttctgaatctagattttttctattctttggtctcaaaattgcacttacattctctctttctaataatgcacttgttctcaagaagaataaatgtctgaattc

SEQ ID NO: 7016 - DNA, 799 bp, Homo sapiens
gtccacagtgtgctctattcttcacctgcaatactgctgaaggaaatcattttggtggatgatgctagtgtagatgagtacttacatgataaactagatgaatatgtaaaacaattttctatagtaaaaatagtcagacaaagagaaagaaaaggtctgatcactgctcggttgctaggagcaacagtcgcaacagctgaaacgctcacatttttagatgctcactcgttttcaactggcgattatagcaatgacagcccaagcaggtgagtgtttctatggttggctagaacctctgttggccagaatagctgagaactacacggctgtcgtaagtccagatattgcatccatagatctgaacacgtttgaattcaacaaaccttctccttatggaagtaaccataaccgtggaaattttgactggagtctttcatttggctgggagtcgcttcctgatcatgagaagcaaagaaggaaagatgaaacctacccaattaaaacacccacttttgcaggaggacttttttccatatcaaaagaatattttgagtatattggaagctatgatgaagaaatggaaatctggggaggtgaaaatatagaaatgtctttcagagtatggcaatgtggtgggcagttggagattatgccttgctctgttgttggacatgtttttcgcagcaaaagccctcatagctttccaaaaggcactcaggtgattgctagaaaccaagttcgccttgcagaagtctggatggatgaatacaaggaaatattttataggagaaatacagat

SEQ ID NO: 7017 - DNA, 651 bp, Homo sapiens
attgacatttaaactctggggcaggtcctcgcgtagaacgcggctgtcagatctgccacttcccctgccgagcggcggtgagaagtgtgggaaccggcgctgccaggctcacctgcctccccgccctccgctcccaggaatctgagaattgctctcacacaccaacccagcaacatccgtggagaaaactctcaccagcaactcctttaaaacaccgtcatttcaaaccattgtggtcttcaagcaacaacagcagcacaaaaaaccccaaccaaacaaaactcttgacagaagctgtgacaaccagaaaggatgcctcataaagggggaagactttaactaggggcgcgcagatgtgtgaggccttttattgtgagagtggacagacatccgagatttcagagccccatattcgagccccgtggaatcccgcggcccccagccagagccagcatgcagaacagtcacagcggagtgaatcagctcggtggtgtctttgtcaacgggcggccactgccggactccacccggcagaagattgtagagctagctcacagcggggcccggccgtgcgacatttcccgaattctgcagacccatgcagatgcaaaagtccaagtgctggacaatcaaaacgtgtccaacggatgt

SEQ ID NO: 7018 - DNA, 1211 bp, Homo sapiens
ctgcatgtttgatttagcaggtgaagtttttagtatttaatgtgagtattttagaaccccagatatgatgtttgttatgtaatctgtactaacagttttgcaatgggaaactcttcccttactggtttgagagttgagtcatatcctgtgaatctaaagctacgttatttaaacatcacgggttcttcttactttcattccaagtcgctgctgtgcagagcagcaagtgctccgtgcagggctgttgctatcacttggaggtgaacagcctcttttgccggtattcagtgaagaaagcaagtctaaatatgcagttctctcactggagtgaaagatgttttgttcatttctaatcaactatgctagacagctgcaagctgaaaagtgcctgcaatttgccatttatttgtaataagaaaataataaacactgctggaaccagtaatgcagaagtccccttggctgatcccggaatgtaccagctggacattacattaagaaggggtcaaagtttagctgctcgagatcgaggagggacgagtgatccatatgtgaagtttaaaatcggaggaaaagaagtttttagaagtaagataatacacaagaacctcaaccctgtgtgggaagaaaaagcttgtattctggttgatcatcttagggagccattgtatataaaggtatttgactatgattttggactacaggatgactttatgggctcagcctttctggatctgacacaattggagttaaacaggcccacagatgtgacccttactctgaaagatcctcattatcctgaccatgatcttggaatcattttgctctcagtcatccttacccctaaagaaggagagtccagggatgtgacaatgctaatgaggaagagttggaaaagatcaagtaagtttcagacccaaagtttacgcctatcagacctacacagaaaatcgcatctttggagaggaatagtcagcatcaccttgattgaagggagagacctcaaggccatggattccaacgggttgagcgatccctacgtgaagttccggcttgggcatcagaagtacaagagcaagattatgccaaaaacgttgaatcctcagtggagggaacaatttgattttcacctttatgaagaaagatgtgggatttctccaggtgaaagtcatcagagcggaagggttaatggctgccgacgtcactggtaa

SEQ ID NO: 7019 - DNA, 777 bp, Homo sapiens
gagagccaggagcatcctgaagctgacccaggtagcgctgccccatacctgaagaccaagtttatctgtgtgacaccattcattgatgcagtttggaaataatggtgaaggtgctgaaccctcagcaggagggcagtttgagtccctcacctttgacatggagttgacctcggagtgcgctacctcccccatgtgaggagctgagaacggaagctgcagaaagatacgactgaggcgcctacctgcattctgccacccctcacacagccaaaccccagatcatctgaaactactaactttgtggttccagattttttttaatctcctacttctgctatctttgagcaatctgggcacttttaaaaatagagaaatgagtgaatgtgggtgatctgcttttatctaaatgcaaataaggatgtgttctctgagacccatgatcaggggatgtggcggggggtggctagagggagaaaaaggaaatgtcttgtgttgttttgttcccctgccctcctttctcagcagctttttgttattgttgttgttgttcttagacaagtgcctcctggtgcctgcggcatccttctgcctgtttctgtaagcaaatgccacaggccacctatagctacatactcctggcattgcactttttaaccttgctgacatccaaatagaagataggactatctaagccctaggtttctttttaaattaagaaataataacaattaaagggcaaaaaacactgtatcagcatagcctttctgtatttaagaa

SEQ ID NO: 7020 - DNA, 992 bp, Homo sapiens
ctccaagcggcccggaacccgcggcttccctggctcccgtgagcatctcaccgggcggcactggccagcgccagccctcgggccggcccggatgagcagactcctgtagacacccgccgccctctcccggctcggcgcagccgccgcccgcgcgcgactcgccccgggacccggcacaggtgacgccgtttggagggggggttggggaggaaggcgggcttgcctcgccccgcggctcccccgcgccagccgccaagcgcagcccgcggagaggggtgccgcggcttcccgcccctggcctagcgcggccgagagctcctgcgcctggaggctgggtgggcgtccggcgcgcgggaggcggcccggggctcccgggcgggctccggcaggtgcagaactcacatagatgaaatgatgggacagatgcagaagaggggactttccaccagttctacttacttcaaagcaaaatgattggctttaaggaaaaggaaacgtgcaaggagtgaacttggatatgttgaagaaatatggagatcaacacaaaactgctcatcagtgttacctgtatcagctttttcacctttcagcttcttttctactttgtaagttactggttttcagcaaaagtttctccaggtttcaatagtctcagcttcaaaaagaagattgaatggaactcaagggtagtatccacatgccattctttggtggttggtatttttggcctgtacattttcttattcgatgaggctactaaagctgatccactttggggtggtccatcacttgcaaacgtgaatattgctattgcctcaggctacctcatttctgatttgtccattataattttgtattggaaagtgattggtgacaaattttttataatgcatcattgtgcgtccctgtatgcatactaccttgtactgaaaaatggagtgctggcatacattgggaattttcgcctgcttgcagagctttccagcccgttt

SEQ ID NO: 7021 - DNA, 3488 bp, Homo sapiens
agacgccttctggattcaagaagacgaggtgagctgaggtacctggctttagtgaagaccctgtgggggcttcctggctgcggcttcgacgtgcctgactccacacgcccctaaggctcacctgttactcggcctcccagaaagatggataggagaaatgactacggatatagggtgcctctatttcagtccaagcatctgaatggggatgagagaagtggcagtaattacaggcggatcccatggggccggaggcctgcaccaccgcgagatgtggccattttacaagaaagggctaataagttggtgaaatacctgttggttaaggaccagacaaagatccccatcaaacgctcagacatgctgagggatgtcatccaagaatatgatgaatatttcccagaaatcattgaacgagcaagctacactctggagaagatgtttcgagtcaatctgaaagaaattgataagcaaagtagcttgtatattctcatcagcactcaggaatcctctgcaggcatactgggaacgaccaaggacacacccaagctgggtctcctcatggtgattctgagtgtcatttttatgaatggcaacaaggccagtgaggctgtcatctgggaggtgctgcgcaagttggggctgcgccctggggtgaggcattcactctttggggaagtgaggaagctcatcacagacgagtttgtgaagcagaagtacctggagtacaagagggtccctaacagcagaccacctgaatatgagttcttctggggcttgcgctcctaccacgagactagcaagatgaaagtcctcaagtttgcatgcagggtgcagaagaaagaccccaaggactgggctgtgcagtaccgcgaggcagtggagatggaagtccaagctgcagctgtggctgtggctgaggctgaagccagggctgaggcaagagcccaaatggggattggagaggaagctgtggctgggccctggaattgggatgacatggatatcgactgcctaacaagggaagagttaggcgatgatgctcaggcctggagcagattttcatttgaaattgaggccagagcccaagaaaatgcagatgccagcaccaacgtcaacttcagcagaggagctagtaccagggctggcttcagcgatggtgctagtattagcttcaatggtgcacccagctccagtggtggcttcagtggtggacctggcattacctttggtgttgcacccagcaccagtgccagcttcagcaatacagccagcattagctttggtggtacactgagcactagctccagcttcagcagcgcagccagcattagctttggttgtgcacacagcaccagcactagtttcagcagtgaagccagcattagctttggtggcatgccttgtaccagtgccagctttagtggtggagtcagctctagttttagtggcccactcagcaccagtgccactttcagtggtggagccagctctggctttggaggcacactcagcaccacggctggctttagtggtgtactcagcactagcaccagctttggcagtgcacccacaacgagcacagtcttcagtagtgcgcttagcaccagcactggctttggaggcatactcagcaccagtgtctgttttggtggctctcccagctccagtggtagctttggtggtacactcagtaccagtatctgcttcggtggctctccctgcaccagcactggctttggaggcacacttagcaccagtgtctcctttggtggctcttccagcaccagtgccaattttggtggtacactaagtaccagcatctgctttgatggctctcccagcactggtgctggctttggtggtgctctcaacaccagtgccagctttggcagtgtgctcaacaccagtactggttttggtggtgctatgagcaccagtgctgactttggcggtacactaagcaccagtgtctgctttggtggctctcctggcaccagtgtcagctttggcagtgcactcaacaccaatgctggttatggtggtgctgtcagcaccaacactgactttggtggtacactaagcaccagcgtctgttttggtggctctcccagcaccagtgctggctttggtggtgcactcaacaccaatgccagctttggctgtgccgtcagcaccagtgccagcttcagtggtgctgtcagcaccagtgcttgcttcagtggtgcaccaatcaccaaccctggctttggcggtgcatttagcaccagtgctggcttcggtggggcacttagtaccgctgctgacttcggtggtactcccagcaacagcattggctttggtgctgctcccagcaccagtgtcagctttggtggtgctcatggcaccagcctctgttttggtggagctcccagcaccagcctctgctttggcagtgcatctaatactaacctatgctttggtggccctcctagcaccagtgcctgctttagtggtgctaccagccctagtttttgtgatggacccagcaccagtaccggtttcagctttggcaatgggttaagcaccaatgctggatttggtggtggactgaacaccagtgctggctttggtggtggcctaggcaccagtgctggcttcagtggtggcctaagcacaagttctggctttgatggtgggctaggtaccagcgctggcttcggtggaggaccaggcaccagcactggttttggtggtggactgggcaccagtgctggcttcagtggcggactgggcaccagtgctggctttggtggtggactggtcactagtgatggctttggtggtggactgggcaccaatgctagtttcggcagcacacttggcaccagtgctggctttagtggtggcctcagcaccagcgatggctttggcagtaggcctaatgccagcttcgacagaggactgagtaccatcattggctttggcagtggttccaacaccagcactggctttactggcgaacccagcaccagcacgggcttcagtagtggacccagttctattgttggcttcagcggtggaccaagcactggtgttggcttctgcagtggaccaagcaccagtggcttcagcggtggaccgagcacaggagctggcttcggcggtggaccaaacactggtgctggctttggtggtggaccgagcaccagtgctggctttggcagtggagccgccagtcttggtgcctgtggcttctcgtatggctagtgaggtttcagatttattccccatgtttacagataccgctaataaattgcagtagtccttcccatggagccaaagtacatccttggaatctttgtccacacagcagtcaaggcagttatggccaatcagctgagggtgtcatgtgatggaaaaatctgtttgctgttcctgctttattgtttgctttctgtgtgctgtcatattttggtatcagagttacattaaatttgcaaaatgaa

SEQ ID NO: 7022 - DNA, 1025 bp, Homo sapiens; identical to SEQ ID NO: 6638

SEQ ID NO: 7023 - DNA, 1188 bp, Homo sapiens; identical to SEQ ID NO: 995

SEQ ID NO: 7024 - DNA, 3048 bp, Homo sapiens
tgtaggaattgatgagtgccatcagaaagctgtatcatgagctgcctgcacttctaaagtgtccagtggatttttaatcacatgagcctggaaatagggttatgagaagaagctcagagcagagcaccgaaagtggccactaccagcatgaagagcccaacaattcaaactggtgaagtgagaaaaacagaatgcagctttcaaggttggttcgtttcaagcagttggcttgtgggactctgagagatgctgctgcccatgacatgcgggaattatcatgatcaactacccagcttggatttcacccagtggccaagagctttgtgtgggagacggcaagggttggatttttcaaaagagtaaaccaggataaatcatgaggaacctataacccttttggccacatgcaaaaaagcaagacccgtgaccaaggtgtagactaagaagtggagtcatgcttcacacggccatatcatgctggcagccattcctgggtctggctgtggtgttaatcttcatgggatccaccattggctgccccgctcgctgtgagtgctctgcccagaacaaatctgttagctgtcacagaaggcgattgatcgccatcccagagggcattcccatcgaaaccaaaatcttggacctcagtaaaaacaggctaaaaagcgtcaaccctgaagaattcatatcatatcctctgctggaagagatagacttgagtgacaacatcattgccaatgtggaaccaggagcattcaacaatctctttaacctgcgttccctccgcctaaaaggcaatcgtctaaagctggtccctttgggagtattcacggggctgtccaatctcactaagcttgacattagtgagaataagattgtcattttactagactacatgttccaagatctacataacctgaagtctctagaagtgggggacaatgatttggtttatatatcacacagggcattcagtgggcttcttagcttggagcagctcaccctggagaaatgcaacttaacagcagtaccaacagaagccctctcccacctccgcagcctcatcagcctgcatctgaagcatctcaatatcaacaatatgcctgtgtatgcctttaaaagattgttccacctgaaacacctagagattgactattggcctttactggatatgatgcctgccaatagcctctacggtctcaacctcacatccctttcagtcaccaacaccaatctgtctactgtacccttccttgcctttaaacacctggtatacctgactcaccttaacctctcctacaatcccatcagcactattgaagcaggcatgttctctgacctgatccgccttcaggagcttcatatagtgggggcccagcttcgcaccattgagcctcactccttccaagggctccgcttcctacgcgtgctcaatgtgtctcagaacctgctggaaactttggaagagaatgtcttctcctcccctagggctctggaggtcttgagcattaacaacaaccctctggcctgtgactgccgccttctctggatcttgcagcgacagcccaccctgcagtttggtggccagcaacctatgtgtgctggcccagacaccatccgtgagaggtctttcaaggatttccatagcactgccctttctttttactttacctgcaaaaaacccaaaatccgtgaaaagaagttgcagcatctgctagtagatgaagggcagacagtccagctagaatgcagtgcagatggagacccgcagcctgtgatttcctgggtgacaccccgaaggcgtttcatcaccaccaagtccaatggaagagccaccgtgttgggtgatggcaccttggaaatccgctttgcccaggatcaagacagcgggatgtatgtttgcatcgctagcaatgctgctgggaatgataccttcacagcctccttaactgtgaaaggattcgcttcagatcgttttctttatgcgaacaggacccctatgtacatgaccgactccaatgacaccatttccaatggcaccaatgccaatactttttccctggaccttaaaacaatactggtgtctacagctatgggctgcttcacattcctgggagtggttttattttgttttcttctcctttttgtgtggagccgagggaaaggcaagcacaaaaacagcattgaccttgagtatgtgcccagaaaaaacaatggtgctgttgtggaaggggaggtagctggacccaggaggttcaacatgaaaatgatttgaaggcccacccctcacattactgtctctttgtcaatgtgggtaatcagtaagacagtatggcacagtaaattactagattaagaggcagccatgtgcagctgcccctgtatcaaaagcagggtctatggaagcaggaggacttccaatggagactctccatcgaaaggcaggcaggcaggcatgtgtcagagcccttcacacagtgggatactaagtgtttgcgttgcaaatattggcgttctggggatctcagtaatgaacctgaatatttggctcacactcacggacaattattcagcattttctaccactgcaaaaaacaaaagaaaaaataaaaaagaacaacctacagtgtaggatttacatattaaaaagacacatttgtctaaaacatactctacagaaaaatttgtatctatgattatcatttgttaaagccttgcatcataccatattgttggttcagtaccacaaagagatcaatatattcttttcttccttttttgaaacatatatgctgtacatgttttaaagcaatatgaatgagaggttgtgcttttagttactcaccactatagatccaagtgtgatttcaccttccgttacctacagatgaccctgagactagatccctggagttatgggcggagatattttgagagatgtgtttgtctgatgtaggatgccaagaaacaggacccaaggcaaaactgctcaactctgttaacttctgttactataaataaaggcatgtgcctagttttgatacagaa

SEQ ID NO: 7025 - DNA, 530 bp, Homo sapiens
gatattctagtattttttatgtcatgctgattaacatttgaataaaatttaaaacaaaaccatactaatgataattttatttttatgtttggtgtaaaacaaaggtccatccaaacgtatcaataggtgtttttattgagcaaccaaccccttttctacctcggtttctggacatattgttgacactggattacccaaaagaagcacttaaactttttattcataacaaagaagtttatcatgaaaaggacatcaaggtattttttgataaagctaagcatgaaatcaaaactataaaaatagtaggaccagaagaaaatctaagtcaagcggaagccagaaacatgggaatggacttttgccgtcaggatgaaaagtgtgattattactttagtgtggatgcagatgttgttttgacaaatccaaggactttaaaaattttgattgaacaaaacagaaagatcattgctcctcttgtaactcgtcatggaaagctgtggtccaatttctggggagcattgagtcctgat

SEQ ID NO: 7026 - DNA, 921 bp, Homo sapiens
tgggagccgtctgtatgttgaattagggctcgcactcttgcgcaacacgtcaccagtcggaaactgggggtttgcttctgtgatttatttcattattgtgctgctgatgaagagactagcagctcgctgctttgctggcttgttaattttatccccactaactgtgatttctgatagccggcctgctgatagtggtaaggccatcgaagacggcaatttggaggaaatggaagaggaagtacggcttaagaagcgaaaaagacgaagaaatgtggataaagatcctgcaaaagaagatgtggaaaaagctaagaagagaagaggccgccctcccgctgagaaactgtcaccaaatccccccaaactgacaaagcagatgaacgctatcatcgatactgtgataaactacaaagatagttcagggcgacagctcagtgaagtcttcattcagttaccttcaaggaaagaattaccagaatactatgaattaattaggaagccagtggatttcaaaaaaataaaggaaaggattcgtaatcataagtaccggagcctaggcgacctggagaaggatgtcatgcttctctgtcacaacgctcagacgttcaacctggagggatcccagatctatgaagactccatcgtcttacagtcagtgtttaagagtgcccggcagaaaattgccaaagaggaagagagtgaggatgaaagcaatgaagaggaggaagaggaagatgaagaagagtcagagtccgaggcaaaatcagtcaaggtgaaaattaagctcaataaaaaagatgacaaaggccgggacaaagggaaaggcaagaaaaggccaaatcgaggaaaagccaaacctgtagtgagcgattttgacagcgatgaggagcaggatgaacgtgtaagtgtagccgactggga

SEQ ID NO: 7027 - DNA, 16737 bp, Homo sapiens; identical to SEQ ID NO: 2299

SEQ ID NO: 7028 - DNA, 1116 bp, Homo sapiens
gatgcctgatctcatcaatctagcgggagagacaggataacctgtccgagagtatagcgccactatgactccgccggaaaaattactttaaaaatcgccaaaaattacttggagcaaagggcagtcggcggagcttcgccaaggctggcgcagtcggttttgacctgtagcagagaaccaattctggagaacagcctcacttctttgattgaatacttacataatgcattggaacatgacatgagattaaggtttaataatgatagaatgaagaccacaataaaagagacctctacttagctcagcaattcttacctttcttacctatttgatgaagatgtcttttgaaaggtgtactgcaaggaacaaaatgtttgtaaattctccttttaccaaggtttcttttttaattgatgccaaagagttccaatattgaacatcttaagtctgttacttggattacggattgagtttggagcttactcagaggactacaggagagtatccaggaagtagcaagaaatgtggataattactgtaccttcctcatggaaaaagttttatttaaagtgttatttctcattgaatactatcaaaaaggaaaaaaaaatgacctaaacttttgagatagatttggctctagtaagtatttagttatatcacttgcatatctgggagaagaaataagagactatcatcagtacattcccatctactaaaaaaatttattttacacatgtcaagggattacttataacttccattttattacgaattgcttgaacctgggaggtggaggttgcagtgggctaagatggcaccactgcactccagcctgggtgagagagcaagaccctgcctcagaaaaaaaaaaaaaaaaaatctaagacctgtatatcaaattttgagtttgtttcttcttttgtacctcaatagttacatttatcaaaaagctgagctgttgtaaaattgtggaattcacattggatattcaaaaacatttcttactattaatgacaaccaatagttatggatatttcattttaaacatggttataaaatgtaaacatgacactaataagctcaataaatgtttggcctgtctagtataataaa

SEQ ID NO: 7029 - DNA, 2085 bp, Homo sapiens
gcgagaagagcagacaccgtgctcctggaatcacccagcatgttgcaaggtctcctgccagtcagtctcctcctctctgttgcagtaagtgctataaaagaactccctggggtgaagaagtatgaagtggtttatcctataagacttcatccactgcataaaagagaggccaaagagccagagcaacaggaacaatttgaaactgaattaaagtataaaatgacaattaatggaaaaattgcagtgctttatttgaaaaaaaacaagaacctccttgcaccaggctacacggaaacatattataattccactggaaaggagatcaccacaagcccacaaattatggatgattgttattatcaaggacatattcttaatgaaaaggtttctgacgctagcatcagcacatgtaggggtctaaggggctacttcagtcagggggatcaaagatactttattgaacctttaagccccatacatcgggatggacaggagcatgcactcttcaagtataaccctgatgaaaagaattatgacagcacctgtgggatggatggtgtgttgtgggcccacgatttgcagcagaacattgccctacctgccaccaaactagtaaaattgaaagacaggaaggttcaggaacatgagaaatacatagaatattatttggtcctggataatggtgagtttaaaaggtacaatgagaatcaagatgagatcagaaagagggtatttgagatggctaattatgtcaacatgctttataaaaagctcaatactcatgtggccttagttggtatggaaatctggactgacaaggataagataaagataaccccaaatgcaagcttcaccttggagaatttttctaaatggagggggagtgttctctcaagaagaaagcgtcatgatattgctcagttaatcacagcaacagaacttgctggaacgactgtgggtcttgcatttatgtctacaatgtgttctccttattctgttggcgttgttcaggaccacagcgataatcttcttagagttgcagggacaatggcacatgaaatgggccacaactttggaatgtttcatgacgactattcttgcaagtgtccttctacaatatgtgtgatggacaaagcactgagcttctatatacccacagacttcagttcctgcagccgtctcagctatgacaagttttttgaagataaattatcaaattgcctctttaatgctccattgcctacagatatcatatccactccaatttgtgggaaccagttggtggaaatgggagaggactgtgattgtgggacatctgaggaatgtaccaatatttgctgtgatgctaagacatgtaaaatcaaagcaacttttcaatgtgcattaggagaatgttgtgaaaaatgccaatttaaaaaggctgggatggtgtgcagaccagcaaaagatgagtgcgacctgcctgaaatgtgtaatggtaaatctggtaattgtcctgatgatagattccaagtcaatggcttcccttgccatcacgggaagggccactgcttgatggggacatgccccacactgcaggagcagtgcacagagctgtggggaccaggtaggaggacaaatcctttcccctgtgcatgtgcgaaggaaaatcatttcagatgacagtgtttaaccatggtcaaaggaccattctgtcctatccttcttagaagctttgaactcaaaatcatggaaaggttttaagatttgaggttggttttagggttgctagatttagcaagtaaaaataaggatggccccgttaaattttaacttaaaattaacaagttttttgttaattttttgttttttgtctcagcatcagtatatcccatgcaatatttgaggtgtgctcatactaaaattatttgtgtatctgaaattcaaattaaactgggtgtctttttcttttcatctggcaaccctactaagatcataaacccttggaaatctgtgtgtgtgcgggtgtgtgtgtgtgtgtgtgtgcaggggtggcagaagtactgtgggatgggacagaaataagaaaagatggaaaaaagaaaa

SEQ ID NO: 7030 - DNA, 720 bp, Homo sapiens
gaaaaaaaccctgcatcttctgaacttgaagaaccaagtttagtttgtgaggaagatgaaattatgaggtctaaagaaagtccagatctttctatttctcattctcaggttgagcagttagtcaataaaacatctgaacttgatatgtctgaaagcaaaacaagaagtggaaaagtctttcagaataaaatggcaaatggaaatcaaccagtaaaatcttccaaagaaaatcggaagagaagtcaacatgaatctgggagaatacagccctactgaagattatacattttgcaagtacatactttcagcagccattggaagatgttaataataaattttactctacttttaagaaacccagatatagttatgctaggtcctccatcactttgattcttctagtcaagagtcagtgccaaaaaggagaaagtttagtgaaccaaaggaacatatataaaaattatttttgttctgcaggcttgcagagttcttctcaccatttaaactgaaggaccctatattatatttccctaactctgaagatgtatatgtagtttaaagcagtttgtacactaaaactaagtttttggctgactgtcatattgtggtccttaatcttgagataaatccaatagaacttttgaataaaagcaaaagtacaaatgtcataattgattcggtaataagtaaaatttcaaaattgattttgttcattaccta

SEQ ID NO: 7031 - DNA, 783 bp, Homo sapiens
cttaccatgagttgccagggctgagagagatggagaaggattcgcggcggtgacagattaaattccccagttacattatagacttggaggtgggggatcttctcatcgttagaggccccgatcatgggagataggcggttcggagccagttctgcctaactttgtgttcactgatgttagggctgctagggctgcaaaggtgggcacccctactcgcctaagagctttctcctctcttctctttttcccctttgcctctctccttacatcacctgcccactaagtagacttgtccttgtgtggacgggagccggaaagccttgagaacttattcctcgacccggacatggcacaggagaaaatgaaactaggtttcaagtcgctgccgagttccactaccgcagacggcaacattctgagaagagtcaacagtgcccctttgatcaatggacttggttttaattcacaggtgttgcaagctgacatgttaagaattaggacaaacagaacaacatttaggaatcgacgctctctgttgttgccacctcctccctttcatggttccatcagccgccttcatcaaatcaaacaggaagaagccatggatttaataaatagagaaacaatgtctgaatggaagctacaaagtgagatacagataagtcactcttgggaagaaggcttgaaactggtgaaatggcatttcaatatcaaccaaaaaagattttccaaggcacaaccaacatgctttcttctgatacttcccaactgtcagaaaataat

SEQ ID NO: 7032 - DNA, 587 bp, Homo sapiens
agtagaactacatcccaggcatgtgtaggccatcgaagacggcaatttggaggaaatggaagaggaagtacggcttaagaagcgaaaaagacgaagaaatgtggataaagatcctgcaaaagaagatgtggaaaaagctaagaagagaagaggccgccctcccgctgagaaactgtcaccaaatccccccaaactgacaaagcagatgaacgctatcatcgatactgtgataaactacaaagatagttcagggcgacagctcagtgaagtcttcattcagttaccttcaaggaaagaattaccagaatactatgaattaattaggaagccagtggatttcaaaaaaataaaggaaaggattcgtaatcataagtaccggagcctaggcgacctggagaaggatgtcatgcttctctgtcacaacgctcagacgttcaacctggagggatcccagatctatgaagactccatcgtcttacagtcagtgtttaagagtgcccggcagaaaattgccaaagaggaagagagtgaggatgaaagcaatgaagaggaggaagaggaagatgaagaagagtcagagtccgagg

SEQ ID NO: 7033 - DNA, 2590 bp, Homo sapiens
agacaaacccaaaacatttatgtgcatagaaaaaaattctggaaggtcgtacacagtgaatttctctgagtgaaaagattgtggcaattgaaacacagagcaccagctctgaggaactcgtcccaagccccccatctccacttcctccccctcgagtgtacaaaccctgcttcgtctgccaggacaaatcatcagggtaccactatggggtcagcgcctgtgagggatgtaagggctttttccgcagaagtattcagaagaatatgatttacacttgtcaccgagataagaactgtgttattaataaagtcaccaggaatcgatgccaatactgtcgactccagaagtgctttgaagtgggaatgtccaaagaatctgtcaggaatgacaggaacaagaaaaagaaggagacttcgaagcaagaatgcacagagagctatgaaatgacagctgagttggacgatctcacagagaagatccgaaaagctcaccaggaaactttcccttcactctgccagctgggtaaatacaccacgaattccagtgctgaccatcgagtccgactggacctgggcctctgggacaaattcagtgaactggccaccaagtgcattattaagatcgtggagtttgctaaacgtctgcctggtttcactggcttgaccatcgcagaccaaattaccctgctgaaggccgcctgcctggacatcctgattcttagaatttgcaccaggtataccccagaacaagacaccatgactttctcagacggccttaccctaaatcgaactcagatgcacaatgctggatttggtcctctgactgaccttgtgttcacctttgccaaccagctcctgcctttggaaatggatgacacagaaacaggccttctcagtgccatctgcttaatctgtggagaccgccaggaccttgaggaaccgacaaaagtagataagctacaagaaccattgctggaagcactaaaaatttatatcagaaaaagacgacccagcaagcctcacatgtttccaaagatcttaatgaaaatcacagatctccgtagcatcagtgctaaaggtgcagagcgtgtaattaccttgaaaatggaaattcctggatcaatgccacctctcattcaagaaatgctggagaattctgaaggacatgaacccttgaccccaagttcaagtgggaacacagcagagcacagtcctagcatctcacccagctcagtggaaaacagtggggtcagtcagtcaccactcgtgcaataagacattttctagctacttcaaacattccccagtaccttcagttccaggatttaaaatgcaagaaaaaacatttttactgctgcttagtttttggactgaaaagatattaaaactcaagaaggaccaagaagttttcatatgtatcaatatatatactcctcactgtgtaacttacctagaaatacaaacttttccaattttaaaaaatcagccatttcatgcaaccagaaactagttaaaagcttctattttcctctttgaacactcaagattgcatggcaaagacccagtcaaaatgatttacccctggttaagtttctgaagactttgtacatacagaagtatggctctgttctttctatactgtatgtttggtgctttccttttgtcttgcatactcaaaataaccatgacaccaaggttatgaaatagactactgtacacgtctacctaggttcaaaaagataactgtcttgctttcatggaatagtcaagacatcaaggtaaggaaacaggactattgacaggactattgtacagtatgacaagataaggctgaagatattctactttagttagtatggaagcttgtctttgctctttctgatgctctcaaactgcatcttttatttcatgttgcccagtaaaagtatacaaattccctgcactagcagaagagaattctgtatcagtgtaactgccagttcagttaatcaaatgtcatttgttcaattgttaatgtcactttaaattaaaagtggtttattacttgtttaatgacataactacacagttagttaaaaaaaatttttttacagtaatgatagcctccaaggcagaaacacttttcagtgttaagtttttgtttacttgttcacaagccattagggaaatttcatgggataattagcaggctggtctaccacctggaccatgtaactctagtgtccttcctgattcatgcctgatattgggatttttttttccagccttcttgatgccaaggggctaattaatattaacaactcccaaagaaacaggcatagaatctgcctcctttgaccttgttcaatcactatgaagcagagtgaaagctgtggtagagtggttaacagatacaagtgtcagtttcttagttctcatttaagcactagtggaattttttttttttgatatattagcaagtctgtgatgtactttcactggctctgtttgtacattgagattgtttgtttaacaatgctttctatgttcatatactgtttacctttttccatggagtctcctggcaaagaataaaatatatttattttaaa

SEQ ID NO: 7034 - DNA, 1060 bp, Homo sapiens
gctcagaacaccaactgctgaggctgccttgggaagaggatgatcctaaacaaagctctgctgctgggggccctcgctctgaccaccgtgatgagcccctgtggaggtgaagacattgtggctgaccacgttgcctcttgtggtgtaaacttgtaccagttttacggtccctctggccagtacacccatgaatttgatggagatgagcagttctacgtggacctggagaggaaggagactgcctggcggtggcctgagttcagcaaatttggaggttttgacccgcagggtgcactgagaaacatggctgtggcaaaacacaacttgaacatcatgattaaacgctacaactctaccgctgctaccaatgaggttcctgaggtcacagtgttttccaagtctcccgtgacactgggtcagcccaacaccctcatttgtcttgtggacaacatctttcctcctgtggtcaacatcacatggctgagcaatgggcagtcagtcacagaaggtgtttctgagaccagcttcctctccaagagtgatcattccttcttcaagatcagttacctcaccttcctcccttctgctgatgagatttatgactgcaaggtggagcactggggcctggaccagcctcttctgaaacactgggagcctgagattccagcccctatgtcagagctcacagagactgtggtctgtgccctggggttgtctgtgggcctcatgggcattgtggtgggcactgtcttcatcatccaaggcctgcgttcagttggtgcttccagacaccaagggccattgtgaatcccatcctggaagggaaggtaagattgagactggttacagttgaagcggcagtatgaaaggaaggaaagtgggagggcgttgtggacatgaatgtggttgaaagttgtaggggaattgggaagtggcatgatgatgacacaggagccccctcggacccattgatctcatgtctgccctgttgcaggtgcatcgccatctacaggagcagaagaatggacttgctaaatgacctagcactattctctggccc

SEQ ID NO: 7035 - DNA, 2599 bp, Homo sapiens
cgagctcgcccgctgtccgccagcccgcgggagggaggagagaagcgaagcgtttccgcggttggctactcagtgtcttggtctcaagttgcctcattgcggctggcgttcccaatacagacgcatcgtttcttttttaatactccctaagaaagggaataaccttcaagctggcgggagcaatggttcacataaagaaaggcgagctgacccaggaggagaaggagctactggaagtcatcgggaaaggtactgtccaagaagctggaacattattatccagcaagaatgttcgtgtcaactgtttggacgagaatggaatgactcctctaatgcatgcagcatataaaggaaaactcgatatgtgcaaattactactgcgacatggagccgatgtaaattgtcatcagcatgaacatggatacacagccctcatgtttgctgcactttctggtaataaagacatcacatgggtaatgttagaagctggtgctgagacagatgttgtcaactctgtgggaagaacagcagctcagatggcagcctttgtgggtcaacatgattgtgtgaccataatcaacaatttctttcctcgagagagactggattattacactaagccccagggactggataaagagccaaaactgcccccaaagttggcaggcccgctgcacaaaattatcaccacaacgaatcttcatcctgtcaagatcgtgatgcttgtaaatgagaatcctctgctgacagaagaagcagccctgaataaatgctacagagtgatggatttgatttgtgagaaatgtatgaagcaaagagacatgaatgaagtattggctatgaagatgcattacataagctgtatctttcagaaatgcattaacttcttaaaagatggagagaataaactggacaccttgatcaaaagcttgttaaaaggccgagcttctgatggctttccagtgtatcaagaaaagatcattagagaaagtatcagaaaatttccttactgtgaagctacactcctccagcagctggttcgaagcattgctcctgttgaaattggttctgatcccactgcattctccgtccttacccaagccatcactggccaggtgggttttgtggatgtggaattttgcactacctgtggagaaaagggagcaagtaaaagatgttcagtttgcaaaatgtgcagagaactttgaaatcatgtgagaaagtgtatgaatgcaaggatgaatgaagaattggggccaataatacaatatatgtataagggcctaccacagtgcttggcatacagtaatatattgtgatcaaacctgccagaaaacacactggtttactcataagaaaatctgtaagaatctgaaggacatttacgaaaagcaacagttggaggctgccaaagaaaagagacaagaggaaaaccacggcaaacttgatgtcaattctaactgtgttaatgaagagcaaccagaggctgaagtaggtatctctcaaaaggattccaatcctgaagattccggggaaggaaagaaagaatctcttgaaagcgaagctgagttggaaggcttacaggatgctcctgcagggccacaggtgtctgaggagtaaaagccagagcaagtgccagtgtggatgatcctcaccctgcaagaagctggaaaactcctaggaatgcattgtcctcaccttgttatacctgcgtggcaccatggcaggattccacatttcatagaatacaggttttcaagcaaacccctgttgaccatgccctaatttcctattgatttctgttctataattgaatggatattcctatggaaaattttttgtttcaaaatacaggaaaaacattcctattacctttctgaggctggctttccagcaattgtttcaaaggaaaatagatccccttaaagaaaaaatacaggctttagggaacaaagggacaagcagaacaggtgtggaagagagattttcaggaagggaaaaatttatagctacagagggtagttagaaaaatcataacttatatgtgaataaaatacatataagcagcatttacggtagtggcattctacttattaagatgcaatgaaatgaagaaaggctttatgttcaaggacctttgccatagttcagctaattgtagttttatatagaaatgatcctgaacactctgaacttgacgtagtcctgcggtgatattctatctgcagtatttgtacctccagaatggcagatccctcagcaggaacaaaggcatattgacggttctctcagcgtatgcattaaaaaaggtacttcctgaaacttttgattcaataatgactaaacatactatgtacacaattactgtaaggctaattcacgtgccatactccacctgaaagcctgagttatcttgctataagcttttcatggagcacttcctttccagaaactgatttgtaactcatttagagaatgtcctggcgtcggtttttagcatatgtggtatttaaacagagctagaatgtgatgtctgaagataatgctgcatttctgggtttcttgtgtggattttaaaataaattgtgcctacaaatat

SEQ ID NO: 7036 - DNA, 7952 bp, Homo sapiens
gcccgcgccggctgtgctgcacagggggaggagagggaaccccaggcgcgagcgggaagaggggacctgcagccacaacttctctggtcctctgcatcccttctgtccctccacccgtccccttccccaccctctggcccccaccttcttggaggcgacaacccccgggaggcattagaagggatttttcccgcaggttgcgaagggaagcaaacttggtggcaacttgcctcccggtgcgggcgtctctcccccaccgtctcaacatgcttaggggtccggggcccgggctgctgctgctggccgtccagtgcctggggacagcggtgccctccacgggagcctcgaagagcaagaggcaggctcagcaaatggttcagccccagtccccggtggctgtcagtcaaagcaagcccggttgttatgacaatggaaaacactatcagataaatcaacagtgggagcggacctacctaggcaatgcgttggtttgtacttgttatggaggaagccgaggttttaactgcgagagtaaacctgaagctgaagagacttgctttgacaagtacactgggaacacttaccgagtgggtgacacttatgagcgtcctaaagactccatgatctgggactgtacctgcatcggggctgggcgagggagaataagctgtaccatcgcaaaccgctgccatgaagggggtcagtcctacaagattggtgacacctggaggagaccacatgagactggtggttacatgttagagtgtgtgtgtcttggtaatggaaaaggagaatggacctgcaagcccatagctgagaagtgttttgatcatgctgctgggacttcctatgtggtcggagaaacgtgggagaagccctaccaaggctggatgatggtagattgtacttgcctgggagaaggcagcggacgcatcacttgcacttctagaaatagatgcaacgatcaggacacaaggacatcctatagaattggagacacctggagcaagaaggataatcgaggaaacctgctccagtgcatctgcacaggcaacggccgaggagagtggaagtgtgagaggcacacctctgtgcagaccacatcgagcggatctggccccttcaccgatgttcgtgcagctgtttaccaaccgcagcctcacccccagcctcctccctatggccactgtgtcacagacagtggtgtggtctactctgtggggatgcagtggctgaagacacaaggaaataagcaaatgctttgcacgtgcctgggcaacggagtcagctgccaagagacagctgtaacccagacttacggtggcaactcaaatggagagccatgtgtcttaccattcacctacaatggcaggacgttctactcctgcaccacagaagggcgacaggacggacatctttggtgcagcacaacttcgaattatgagcaggaccagaaatactctttctgcacagaccacactgttttggttcagactcgaggaggaaattccaatggtgccttgtgccacttccccttcctatacaacaaccacaattacactgattgcacttctgagggcagaagagacaacatgaagtggtgtgggaccacacagaactatgatgccgaccagaagtttgggttctgccccatggctgcccacgaggaaatctgcacaaccaatgaaggggtcatgtaccgcattggagatcagtgggataagcagcatgacatgggtcacatgatgaggtgcacgtgtgttgggaatggtcgtggggaatggacatgcattgcctactcgcagcttcgagatcagtgcattgttgatgacatcacttacaatgtgaacgacacattccacaagcgtcatgaagaggggcacatgctgaactgtacatgcttcggtcagggtcggggcaggtggaagtgtgatcccgtcgaccaatgccaggattcagagactgggacgttttatcaaattggagattcatgggagaagtatgtgcatggtgtcagataccagtgctactgctatggccgtggcattggggagtggcattgccaacctttacagacctatccaagctcaagtggtcctgtcgaagtatttatcactgagactccgagtcagcccaactcccaccccatccagtggaatgcaccacagccatctcacatttccaagtacattctcaggtggagacctaaaaattctgtaggccgttggaaggaagctaccataccaggccacttaaactcctacaccatcaaaggcctgaagcctggtgtggtatacgagggccagctcatcagcatccagcagtacggccaccaagaagtgactcgctttgacttcaccaccaccagcaccagcacacctgtgaccagcaacaccgtgacaggagagacgactcccttttctcctcttgtggccacttctgaatctgtgaccgaaatcacagccagtagctttgtggtctcctgggtctcagcttccgacaccgtgtcgggattccgggtggaatatgagctgagtgaggagggagatgagccacagtacctggatcttccaagcacagccacttctgtgaacatccctgacctgcttcctggccgaaaatacattgtaaatgtctatcagatatctgaggatggggagcagagtttgatcctgtctacttcacaaacaacagcgcctgatgcccctcctgacacgactgtggaccaagttgatgacacctcaattgttgttcgctggagcagaccccaggctcccatcacagggtacagaatagtctattcgccatcagtagaaggtagcagcacagaactcaaccttcctgaaactgcaaactccgtcaccctcagtgacttgcaacctggtgttcagtataacatcactatctatgctgtggaagaaaatcaagaaagtacacctgttgtcattcaacaagaaaccactggcaccccacgctcagatacagtgccctctcccagggacctgcagtttgtggaagtgacagacgtgaaggtcaccatcatgtggacaccgcctgagagtgcagtgaccggctaccgtgtggatgtgatccccgtcaacctgcctggcgagcacgggcagaggctgcccatcagcaggaacacctttgcagaagtcaccgggctgtcccctggggtcacctattacttcaaagtctttgcagtgagccatgggagggagagcaagcctctgactgctcaacagacaaccaaactggatgctcccactaacctccagtttgtcaatgaaactgattctactgtcctggtgagatggactccacctcgggcccagataacaggataccgactgaccgtgggccttacccgaagaggacagcccaggcagtacaatgtgggtccctctgtctccaagtacccactgaggaatctgcagcctgcatctgagtacaccgtatccctcgtggccataaagggcaaccaagagagccccaaagccactggagtctttaccacactgcagcctgggagctctattccaccttacaacaccgaggtgactgagaccaccattgtgatcacatggacgcctgctccaagaattggttttaagctgggtgtacgaccaagccagggaggagaggcaccacgagaagtgacttcagactcaggaagcatcgttgtgtccggcttgactccaggagtagaatacgtctacaccatccaagtcctgagagatggacaggaaagagatgcgccaattgtaaacaaagtggtgacaccattgtctccaccaacaaacttgcatctggaggcaaaccctgacactggagtgctcacagtctcctgggagaggagcaccaccccagacattactggttatagaattaccacaacccctacaaacggccagcagggaaattctttggaagaagtggtccatgctgatcagagctcctgcacttttgataacctgagtcccggcctggagtacaatgtcagtgtttacactgtcaaggatgacaaggaaagtgtccctatctctgataccatcatcccagctgttcctcctcccactgacctgcgattcaccaacattggtccagacaccatgcgtgtcacctgggctccacccccatccattgatttaaccaacttcctggtgcgttactcacctgtgaaaaatgaggaagatgttgcagagttgtcaatttctccttcagacaatgcagtggtcttaacaaatctcctgcctggtacagaatatgtagtgagtgtctccagtgtctacgaacaacatgagagcacacctcttagaggaagacagaaaacaggtcttgattccccaactggcattgacttttctgatattactgccaactcttttactgtgcactggattgctcctcgagccaccatcactggctacaggatccgccatcatcccgagcacttcagtgggagacctcgagaagatcgggtgccccactctcggaattccatcaccctcaccaacctcactccaggcacagagtatgtggtcagcatcgttgctcttaatggcagagaggaaagtcccttattgattggccaacaatcaacagtttctgatgttccgagggacctggaagttgttgctgcgacccccaccagcctactgatcagctgggatgctcctgctgtcacagtgagatattacaggatcacttacggagagacaggaggaaatagccctgtccaggagttcactgtgcctgggagcaagtctacagctaccatcagcggccttaaacctggagttgattataccatcactgtgtatgctgtcactggccgtggagacagccccgcaagcagcaagccaatttccattaattaccgaacagaaattgacaaaccatcccagatgcaagtgaccgatgttcaggacaacagcattagtgtcaagtggctgccttcaagttcccctgttactggttacagagtaaccaccactcccaaaaatggaccaggaccaacaaaaactaaaactgcaggtccagatcaaacagaaatgactattgaaggcttgcagcccacagtggagtatgtggttagtgtctatgctcagaatccaagcggagagagtcagcctctggttcagactgcagtaaccaacattgatcgccctaaaggactggcattcactgatgtggatgtcgattccatcaaaattgcttgggaaagcccacaggggcaagtttccaggtacagggtgacctactcgagccctgaggatggaatccatgagctattccctgcacctgatggtgaagaagacactgcagagctgcaaggcctcagaccgggttctgagtacacagtcagtgtggttgccttgcacgatgatatggagagccagcccctgattggaacccagtccacagctattcctgcaccaactgacctgaagttcactcaggtcacacccacaagcctgagcgcccagtggacaccacccaatgttcagctcactggatatcgagtgcgggtgacccccaaggagaagaccggaccaatgaaagaaatcaaccttgctcctgacagctcatccgtggttgtatcaggacttatggtggccaccaaatatgaagtgagtgtctatgctcttaaggacactttgacaagcagaccagctcagggagttgtcaccactctggagaatgtcagcccaccaagaagggctcgtgtgacagatgctactgagaccaccatcaccattagctggagaaccaagactgagacgatcactggcttccaagttgatgccgttccagccaatggccagactccaatccagagaaccatcaagccagatgtcagaagctacaccatcacaggtttacaaccaggcactgactacaagatctacctgtacaccttgaatgacaatgctcggagctcccctgtggtcatcgacgcctccactgccattgatgcaccatccaacctgcgtttcctggccaccacacccaattccttgctggtatcatggcagccgccacgtgccaggattaccggctacatcatcaagtatgagaagcctgggtctcctcccagagaagtggtccctcggccccgccctggtgtcacagaggctactattactggcctggaaccgggaaccgaatatacaatttatgtcattgccctgaagaataatcagaagagcgagcccctgattggaaggaaaaagacagttcaaaagacccctttcgtcacccaccctgggtatgacactggaaatggtattcagcttcctggcacttctggtcagcaacccagtgttgggcaacaaatgatctttgaggaacatggttttaggcggaccacaccgcccacaacggccacccccataaggcataggccaagaccatacccgccgaatgtaggacaagaagctctctctcagacaaccatctcatgggccccattccaggacacttctgagtacatcatttcatgtcatcctgttggcactgatgaagaacccttacagttcagggttcctggaacttctaccagtgccactctgacaggcctcaccagaggtgccacctacaacgtcatagtggaggcactgaaagaccagcagaggcataaggttcgggaagaggttgttaccgtgggcaactctgtcaacgaaggcttgaaccaacctacggatgactcgtgctttgacccctacacagtttcccattatgccgttggagatgagtgggaacgaatgtctgaatcaggctttaaactgttgtgccagtgcttaggctttggaagtggtcatttcagatgtgattcatctagatggtgccatgacaatggtgtgaactacaagattggagagaagtgggaccgtcagggagaaaatggccagatgatgagctgcacatgtcttgggaacggaaaaggagaattcaagtgtgaccctcatgaggcaacgtgttatgatgatgggaagacataccacgtaggagaacagtggcagaaggaatatctcggtgccatttgctcctgcacatgctttggaggccagcggggctggcgctgtgacaactgccgcagacctgggggtgaacccagtcccgaaggcactactggccagtcctacaaccagtattctcagagataccatcagagaacaaacactaatgttaattgcccaattgagtgcttcatgcctttagatgtacaggctgacagagaagattcccgagagtaaatcatctttccaatccagaggaacaagcatgtctctctgccaagatccatctaaactggagtgatgttagcagacccagcttagagttcttctttctttcttaagccctttgctctggaggaagttctccagcttcagctcaactcacagcttctccaagcatcaccctgggagtttcctgagggttttctcataaatgagggctgcacattgcctgttctgcttcgaagtattcaataccgctcagtattttaaatgaagtgattctaagatttggtttgggatcaataggaaagcatatgcagccaaccaagatgcaaatgttttgaaatgatatgaccaaaattttaagtaggaaagtcacccaaacacttctgctttcacttaagtgtctggcccgcaatactgtaggaacaagcatgatcttgttactgtgatattttaaatatccacagtactcactttttccaaatgatcctagtaattgcctagaaatatctttctcttacctgttatttatcaatttttcccagtatttttatacggaaaaaattgtattgaaaacacttagtatgcagttgataagaggaatttggtataattatggtgggtgattattttttatactgtatgtgccaaagctttactactgtggaaagacaactgttttaataaaagatttacattccacaa

SEQ ID NO: 7037 - DNA, 378 bp, Homo sapiens
ccgccccgcacgcccgccgaggctcggggctcgggccgggctccgcgcggagttgcagcggtggccggatgccaagtgtaagtgattttttatcaagcagaaatgcatcgaacaacgagaatcaagatcactgagctaaatccccacctgatgtgtgtgctttgtggagggtacttcattgatgccacaaccataatagaatgtctacattccttctgtaaaacgtgtattgttcgttacctggagaccagcaagtattgtcctatttgtgatgtccaagttcacaagaccagaccactactgaatataaggtcagataaaactctccaagatattgtatacaaattagttccagggcttttcactgccaatggctct

SEQ ID NO: 7038 - DNA, 1822 bp, Homo sapiens
ctggtcgtatcagacgccaccctcttcccccagcaccaccatgtccagaaagtccagtgtctgcagcagcctgaacagtgtcaacagcagtgactcccggtccagcggctcccactcgcattcccccagctcacattaccgctaccgcagctccaacctggcccagcaggctcctgtgaggctgtccagcgtgtcctcccatgactcaggattcatatcccaggatgccttccagtccaagtcaccatcccccatgccgccagaggcccccaaccagaactcgtccagctcggcctcctccgaagcctcggaaacctgccagtcagtgagcgagtgcagctcccccacctctgtcagctcgggctccaccatgggtgcctgggtgtccacagagaagttgtctaacgggttttctcactatagtttatcaagtgagtcccacgtggggcccacgggtgcaggccttttccctcattgcctgcctgcctcccgcctgctccctcgggtcacctctgtccaccttccagactacgctcattattacaccattgggcccggcatgttcccgtcatctcagatccctagctggaaggactgggctaagcctgggccctatgaccagcctctggtgaacaccctgcagcgccgcaaagagaagcgagaaccggaccccaacgggggaggacccactaccgccagcggcccacctgcagcagctgaggaggctcagagaccacggagcatgactgtatcggctgccaccaggcctggtgaggagatggaggcttgtgaggagctggccctggccctgtctcggggcctgcagctggacacccagaggagcagccgggactcgcttcagtgctccagcggctacagcacccagacaaccaccccctgctgctctgaggacaccatcccttcccaagtttcagattatgattatttctctgtaagtggtgaccaggaggcagatcagcaggagttcgacaagtcctccaccattccaagaaacagcgacatcagccagtcctaccgacggatgttccaagccaagcgtccagcctcaactgctggcctccccaccaccctgggacctgctatggtcactccaggggttgcaactatccgacggaccccttccaccaagccttctgtccgccggggaaccattggagctggtcccatccccatcaagacacccgtgatccctgtcaagaccccaaccgtcccagacctcccaggggtgttgccagcccctccagatgggccagaagagcggggggagcacagccctgagtcgccatctgtgggtgagggcccccaaggtgtcaccagcatgccctcctcaatgtggagcggccaagcttccgttaaccctccacttccaggcccgaagcccagtatccctgaggagcacagacaggcaattccagaaagtgaagctgaagaccaggaacgggaacccccaagtgccactgtctccccaggccagattccagagagtgaccctgcagacctgagcccaagggatactccacaaggagaagacatgctgaacgccatccgaaggggcgtgaaactgaagaagaccacgacaaacgatcgctcagcccctcgcttttcttaggttcacaagaaatgcgccggtggggaatgaactgtttcattaataaaacctaatttgtcttgatccattccactctataataaaacaaaagattttgtaggcaactcggaatatagctcttttgaaagtactcgacacctttagataagaattaaaaccaacctatgtaactgacataatcttgatctttta

SEQ ID NO: 7039 - DNA, 761 bp, Homo sapiens; identical to SEQ ID NO: 6637

SEQ ID NO: 7040 - DNA, 4182 bp, Homo sapiens
atggccagaagacatgaacgtgtcactagaaggatgtggacatgggctccgggactgttgatgatgactgtggtgttttggggtcatcaggggaatggacaaggccaaggatcgcgtcttcgccaggaggactttcccccgcggattgtggagcatccttccgatgtcatcgtctctaagggcgagcccacgactctgaactgcaaggcggagggccggccaacgcccaccattgagtggtacaaagatggggagcgagtggagactgacaaggacgatccccggtcccacaggatgcttctgcccagcggatccttattcttcttgcgcatcgtgcacgggcgcaggagtaaacctgatgaaggaagctacgtttgtgttgcgaggaactatcttggtgaagcagtgagtcgaaatgcgtctctggaagtggcattgttacgagatgacttccgacaaaaccccacagatgttgtagtggcagctggagagcctgcaatcctggagtgccagcctccccggggacacccagaacccaccatctactggaaaaaagacaaagttcgaattgatgacaaggaagaaagaataagtatccgtggtggaaaactgatgatctccaataccaggaaaagtgatgcagggatgtatacttgtgttggtaccaatatggtgggagaaagggacagtgacccagcagagctgactgtctttgaacgacccacatttctcaggaggccaattaaccaggtggtactggaggaagaagctgtagaatttcgttgtcaagtccaaggagatcctcaaccaactgtgaggtggaaaaaggatgatgcagacttgccaagaggaaggtatgacatcaaagacgattacacactaagaattaaaaagaccatgagtacagatgaaggcacctatatgtgtattgctgagaatcgggttggaaaaatggaagcctctgctacactcaccgtccgagctcccccacagtttgtggttcggccaagagatcagattgttgctcaaggtcgaacagtgacatttccctgtgaaactaaaggaaacccacagccagctgttttttggcagaaagaaggcagccagaacctacttttcccaaaccaaccccagcagcccaacagtagatgctcagtgtcaccaactggagacctcacaatcaccaacattcaacgttccgacgcgggttactacatctgccaggctttaactgtggcaggaagcattttagcaaaagctcaactggaggttactgatgttttgacagatagacctccacctataattctacaaggcccagccaaccaaacgctggcagtggatggtacagcgttactgaaatgtaaagccactggtgatcctcttcctgtaattagctggttaaaggagggatttacttttccgggtagagatccaagagcaacaattcaagagcaaggcacactgcagattaagaatttacggatttctgatactggcacttatacttgtgtggctacaagttcaagtggagagacttcctggagtgcagtgctggatgtgacagagtctggagcaacaatcagtaaaaactatgatttaagtgacctgccagggccaccatccaaaccgcaggtcactgatgttactaagaacagtgtcaccttgtcctggcagccaggtacccctggaacccttccagcaagtgcatatatcattgaggctttcagccaatcagtgagcaacagctggcagaccgtggcaaaccatgtaaagaccaccctctatactgtaagaggactgcggcccaatacaatctacttattcatggtcagagcgatcaacccccaaggtctcagtgacccaagtcccatgtcagatcctgtgcgcacacaagatatcagcccaccagcacaaggagtggaccacaggcaagtgcagaaagagctaggagatgtccttgtccgtcttcataatccagttgtgctgactcccaccacggttcaggtcacatggacggttgatcgccaaccccagtttatccaaggctaccgagtgatgtatcgtcagacttcaggtctgcaggcgacatcttcgtggcagaatttagatgccaaagtcccgactgaacgaagtgctgtcttagtcaacctgaaaaagggggtgacttatgaaattaaagtacggccatattttaatgagttccaaggaatggatagtgaatctaaaacggttcgtactactgaagaagccccaagtgccccaccacagtctgtcactgtactgacagttggaagctacaatagcacaagtattagtgtttcctgggatcctcctcctccagatcaccagaatggaattatccaagaatacaagatctggtgtctaggaaatgaaacgcgattccatatcaacaaaactgtggatgcagccattcggtccgtaataattggtggattattcccaggtattcaataccgggtagaggttgcagctagtaccagtgcaggggttggagtaaagagtgagccacagccaataataatcgggagacgcaatgaagttgtcattactgaaaacaataacagcataactgagcaaatcactgatgtggtgaagcaaccagcctttatagctggtattggtggtgcctgctgggtaattctgatgggttttagcatatggttgtattggcgaagaaagaagaggaagggactcagtaattatgctgttacgtttcaaagaggagatggaggactaatgagcaatggaagccgtccaggtcttctcaatgctggtgatcccagctatccatggcttgctgattcttggccagccacgagcttgccagtaaataatagcaacagtggcccaaatgagattggaaattttggccgtggagatgtgctgccaccagttccaggccaaggggataaaacagcaacgatgctctcagatggagccatttatagtagcattgacttcactaccaaaaccagttacaacagttccagccaaataacacaggctaccccatatgccacgacacagatcttgcattccaacagcatacatgaattggctgtcgatctgcctgatccacaatggaaaagctcaattcagcaaaaaacagatctgatgggatttggttattctctacctgatcagaacaaaggtaacaatggtgggaaaggtggaaaaaagaagaaaaataaaaactcttctaaaccacagaaaaacaatggatccacttgggccaatgtccctctacctccccccccagtccagccccttcctggcacggagctggaacactatgcagtggaacaacaagaaaatggctatgacagtgatagctggtgcccaccattgccagtacaaacttacttacaccaaggtctggaagatgaactggaagaagatgatgatagggtcccaacacctcctgttcgaggcgtggcttcttctcctgctatctcctttggacagcagtccactgcaactcttactccatccccacgggaagagatgcaacccatgctgcaggctcacctggatgagttgacaagagcctatcagtttgatatagcaaaacaaacatggcacattcaaagcaataatcaacctccacagcctccagttccaccgttaggttatgtgtctggagccttgatttctgatttggaaacggatgttgcagatgatgatgccgacgacgaagaggaagctttagaaatccccaggcccctgagagcactggaccagactcctggatccagcatggacaatctagacagctctgtgacaggaaaagcctttacctcctctcaaagacctcgacctaccagcccattttctactgacagtaacaccagtgcagccctgagtcaaagtcagaggcctcggcccactaaaaaacacaagggagggcggatggaccaacaaccagcattgcctcatcgaagggaaggaatgacagatgaggaggccttggtgccctatagcaagcccagtttcccatctccaggtggccacagctcatcaggaacagcttcttctaagggatccactggacctaggaaaaccgaggtgttgagagcaggccaccagcgcaatgccagcgaccttcttgacataggatatatgggctccaacagtcaaggacagtttacaggtgaatta

SEQ ID NO: 7041 - DNA, 1877 bp, Homo sapiens
aaatgtgggtcctacttcctcttcttgctaacggaaaacaatgagaagcagcaagttacaatctccttctcctagccaggagaagcaaggggtgtatttacaggagacagcaatggaaacctggtcagttgagcaggtctgcagttggttggtggagaaaaatttaggagagctagttcatagatttcaagaggaagaagtaagtggggccgctcttcttgcacttaatgatcggatggttcagcaactggtaaagaaaattgggcaccaggctgttctgatggatttaattaaaaaatacaagcagaacactcaaggactgaagtccccagaaaaccccaaaaaggcagccctggtcatgcaaacagaagcagctcgagattacagggatgaagagtcctccagtccagccaggcatggggagcagatgccatctttctatccagctgaaaaccttgataatggactaattgaccaaagagtattgaaacagagaagaaatgtgaaacaaattctagcaagaagcaaagcattacagtggacgaagtcctatgttttaccagagtttccctatgatgtcaaatgcatgttagcagagcagaagtgcccggatcacagcatgaggataaggatcattgagtttctccaggccgacatgactaagtatctggaaggctcactgtaccccagcacccagcagtacaatgacgtggttaatgccctgctgcaggcccaccctttcctggatgaggatggctgtggcttctttttatggaaacgagccctcaaagatcgctttaaatatgttcgaagacccatagaagatgatgagcaagtgattagaaataagtgtaaatttggacaccgaagaggccagacaaggaaatctcttgctgatataagatttgatgaaattaaacttgtccagataaaagaagaagctgtttgttttgattctgagctagatgaacatattaagtggttccagcaagaatacgtgaaaacagaaaaggactggagagaaattgacaagagaatgagccaaactttggaaataagaagaaagatgattggcagccgaacacctctgaaggacattcttaaactgtttcctttcttgaagtgcccttatcagatgttcagagaattccaacttcttacaagaacagatatttataagaaaacaaggcacattttggaatcctattcagaaaatatactgacttctttttcagtggtggacaatccaatcaatattgtattgcaagaaaaaatgaaacattacacagatgaagacatgttgaaatacatgaagatgacagccacatgtttactcctcccagatgtttttggggatgatcccagcctttttgtcatcatgaatgaacaggtgcaagtgtccacacctgtgttggaagttaaaaaccctttcaacatggaggtctgcgaattttctttatatttagaaagggagaggctcacaaaggtggacgactgtgttacagccttggctgcgctagtagctgcctttcatgtatttaggattgagtgtccaagaagactgtcccaaactttcaacttcctagaaacgctgattttcgatatgcacagtccttattttccttctttgaaagaaaaggaaaacgaagtaggatttcagcacccactcacttaatagcatgccaaatattgtactggaatttacctctgggaaaactgaagcttcataagaaattgttttgatttagggttgtggtagaggtaggtatgagaaaatcatcttgtatttatagatgctaatgaatttcaatgctttctatctttacacttagatattaagttctttgtgaaattctgtaataaaattctacttcatt

SEQ ID NO: 7042 - DNA, 3624 bp, Homo sapiens
cttagaccttggttagatttgaaccaaggccctcctcggcctcccaaagtgctgggattacaggcgtgagccactgcccagctgaaaattgatacatttttcaaatgagaagtatttttttcaaatgggtgttggaaagtgagtttcctcacattgttcatgttgtgacactaggttggtgctatgtaatgacatggatatgaacgagctgcctacgaacctccccgtggacactgtgaagcttcgcatagagaagactgtcatccgcagaatctctgcggaggccttctattacctggtggagctccagtatctctgggtgacttacaattccgtggccagcattgaccccagcagcttttacaacctgaagcaactgcatgagttgcgcttggatgggaattctctggctgctttcccttgggcatctctgctggacatgccccttctgaggaccctggacttgcacaataacaaaataaccagtgtgccaaatgaggcgctcaggtatctgaagaaccttgcctacttggatttatcaagcaacagactcaccacattgccaccagatttcctggagagctggactcatttagtttcaacaccttctggagtcctggacctttccccaagcaggattattcttggtctacaggacaatccttggttctgtgactgtcatatttccaaaatgattgagttgtcaaaggtcgttgaccctgctatagtgcttctggatccactgatgacttgcagtgaacctgagcgcctcacaggaattttgtttcagcgggctgaattggagcattgtctgaaaccatcagtgatgacctcagccaccaaaatcatgtctgctctgggcagtaatgttctactgcggtgtgatgccactggcttccccaccccacagatcacatggaccagatctgacagctcgccagttaattatacagtaatacaagaatctccagaggaaggagtcagatggtccataatgagcttgacaggcatttcttccaaagacgctggggattacaaatgtaaggccaaaaatctggctgggatgtcagaagctgtggttactgtgacagtgcttggcattaccacaactccaataccaccagacacttctgaaagaactggagatcatcctgagtgggatgtccagccgggatctggaagatctacatctgtatctagcgcatcatcatatctttggtcctcttccttctcccccacatcttctttttctgcttctactttgtctcctccctctactgcttccttctctttatctcctttctcctcctccactgtttcttcaaccacaactctgagcacaagcatctcagcaagtaccaccatggccaacaagcgatcattccagctccaccaaggtgggaaaagaaatttaaaggtggcaaagaatggaagtaagcttcctccagccagcacaagtaagaaagaagagctggcattgttggatcaaacaatgcttacggagacaaatgccgcaatagaaaacctcagggtggtcagtgagactaaagagagtgtgacattgacgtggaatatgatcaacaccacacataactctgcagtgactgtgttgtattccaagtatggtgggaaggacctgctgctgttgaatgcagactccagcaagaaccaagtaaccatagatggcttggaacccggtgggcaatacatggcctgtgtctgtccaaaaggagtgcctccccagaaagaccaatgcatcaccttttctactgaaagagttgaaggagatgattctcaatggtctctccttctcgtggtgaccagtactgcctgtgttgttatcttaccattgatttgtttcttgttgtacaaagtttgcaaactgcaatgtaaatcagaacctttttgggaagatgatttggcaaaggagacttatatccaatttgagaccctgtttcccaggtctcaaagtgtaggtgagctctggacacgaagccacagggatgactcagagaaattgctgctttgttctaggtcaagtgtggaatctcaggtgacttttaaaagtgaaggttccagaccagagtattattgctaaggttctgcagctcaggtgcatgtgagctacaaaactagcatctaagggtataattgaccctaggtttggatgacttttggacagactttcacattgtacatgaaaatcacaaatggaatgcttttaagtatgtttaaaaaataccatgagacctctgaactgaaaagacaaataatgttgattttttttcttgtgtggaaaaggtctacagaaataatttttagagtggtgcttaataaattattaatactttttagggtaatgttttagttcttaaaaataagttcatgtgaaagtagcaagtgaactctgtatttaaaaatatagttttttgagtcatgaggaaacattagcaaaaccagctaagccttgatgtttattcatgttcgaagtgcattatagcatttgctgtggatgttttctgacattgcctaatggagagcgtgggatcataaaggattttgtgttcactaaggttaaatctaactcacgggagagagagggctctgtctcttggtaccattatgcattgtgatactatagagttgtgttcatatttcttgtaagaaaaatttttgcttttctttagaaatataggtattagcaaaagtaagtatacaaagaggattatgacaaatagaccatttctttaaaaatggtaactgttgcatttaaacacatcgactgacagattatatggatatttaaaaataactttaaatcaatcttttaatattttgctgtttgctcttatgttctcccttctttcttccttccttgtcttccctccctttccttccttcattctttctttcttctgctctgtcagaagatatacaagtagccaaagcatcacgagccaagctgtttgtcttttgccatattgtcttttgattctcttgataaagagaaagcttttgaaattacttactgccctttgaaagtctgttttacaaccccaaaggatattttaggactttaaaagggaagcttcagtggattcatttggttagattcttttcctaggttaaaaacatcggggaacttaaatacataggaaaggagttcacaaataaaatttagtttttttagaaagagaatattttaataactgtagtatactacaagaaacatctcatggctttaagattaacgatagcgataaggcccactcaagcatctcacagtggtgatattacatgtcacttagcaggatgcaacctggcctagggatttccagaagacaaggccacctcagcacagatgcaactttcataaattttagaacaaagcctaaccttactagattaaacttgctctatgaaagaaacacttggtaattgacccagactgaatacatgtataagaaatgggaaagatctcccaaactctgagaacggtcctcaaatagaagctctcctagtcagttggtcatctgacctctgactatatccggcctatgacaccagccagctcctgctttctgtcttgtaagagcactgctggaataaactacttgagcatta

SEQ ID NO: 7043 - DNA, 1163 bp, Homo sapiens; identical to SEQ ID NO: 6495

SEQ ID NO: 7044 - DNA, 678 bp, Homo sapiens
gcgatcggtccggtcggtggctccccgcggcggggccgggcccgatctcgggcgggaaccgagcgcagagccggtagcgggaaggatgaccacgctcacacgacaagacctcaactttggccaaggtagggaggctggacctgcgggcccgggggcgggggcgtctgggccggcgggcttcctcgagcgcgccaccggcttgtgcccccctgcagtggtggccgatgtgctctgcgagttcctggaggtggctgtgcatctcatcctctacgtgcgcgaggtctaccccgtgggcatcttccagaaacgcaagaagtacaacgtgccggtccagatgtcctgccacccggagctgaatcagtatatccaggacacgctgcactgcgtcaagccactcctggagaagaatgatgtggagaaagtggtggtggtgattttggataaagagcaccgcccagtggagaaattcgtctttgagatcacccagcctccactgctgtccatcagctcagactcgctgttgtctcatgtggagcagctgctccgggccttcatcctgaagatcagcgtgtgcgatgccgtcctggaccacaaccccccaggctgtaccttcacagtcctggtgcacacgagagaagccgccactcgcaacatggagaagatccaggtcatcaaggt

SEQ ID NO: 7045 - DNA, 824 bp, Homo sapiens
aatgagagccagcattcataagaaacttcgcaagagcagtggaatagtgaccattctttattctgcctttgtcctggtgagcacatctgatatggcagaggaaactgaggatgcctggccgaggtgctatctccagttccttgcactcctgttaacaagcacctcagcgagagcagcagcagcgatagcagccgcagaagagccagcggggtcgcctagtgtcatgaccagggcgggagatcacaaccgccagagaggatgctgtggatccttggccgactacctgacctctgcaaaattccttctctaccttggtcattctctctctacttggggagatcggatgtggcactttgcggtgtctgtgtttctggtagagctctatggaaacagcctccttttgacagcagtctacgggctggtggtggcagggtctgttctggtcctgggagccatcatcggtgactgggtggacaagaatgctagacttaaagtggcccagacctcgctggtggtacagaatgtttcagtcatcctgtgtggaatcatcctgatgatggttttcttacataaacatgagcttctgaccatgtaccatggatgggttctcacttcctgctatatcctgatcatcactattgcaaatattgcaaatttggccagtactgctactgcaatcacaatccaaagggattggattgttgttgttgcaggagaagacagaagcaaactagcaaatatgaatgccacaatacgaaggattgaccagttaaccaacatcttagcccccatggctgttggccagattatgacatttggctccc

SEQ ID NO: 7046 - DNA, 553 bp, Homo sapiens
gttctcccattgtcagccagtctatttccagattgtttgaacttctctggccgcacaatacaggaaggaagactaaagcagcaaagggacctacagcgtctgcagcatgggctggttaactaggattgtctgtcttttctggggagtattacttacagcaagagcaaactatcagaatgggaagaacaatgtgccaaggctgaaattatcctacaaagaaatgttggaatccaacaatgtgatcactttcaatggcttggccaacagctccagttatcataccttccttttggatgaggaacggagtaggctgtatgttggagcaaaggatcacatattttcattcgacctggttaatatcaaggattttcaaaagattgtgtggccagtatcttacaccagaagagatgaatgcaagtgggctggaaaagacatcctgaaagaatgtgctaatttcatcaaggtacttaaggcatataatcagactcacttgtacgcctgtggaacgggggcttttcatccaatttgcacctacattgaaattggacatcat

SEQ ID NO: 7047 - DNA, 3238 bp, Homo sapiens
agtgtggttttagtttttcctaagaagtggcgtggtttggggctttatatccgggaggagcatatgtacgcaaatcctggggcgtttgcaaacccggatccggggcgtctggccccatgcccggccgggcgtttgagggctactgccacgcagcgtttctggagcctgccggctggtgccctggtggcctttatctctgtccccctttgtcctctttatctcaggctctccaggaggccggggggcccactccgcctatcgctcccctcggctacgctgccacttcaatgccccgcaggtcgcgagctgctgttctttcgaaggcgtcggagaaccaggggcgtcccgcgccacctctgactcggagcagcgccgagcactgacgctcccgcccttgggcaaggacgccagtgcgcccgcgcgcgtccctctgcgcggcagcccgtcgcgggccctcaaggggaagcccaggccaggatggccccgggtcgcgcggtggccgggctcctgttgctggcggccgccggcctcggaggagtggcggaggggccagggctagccttcagcgaggatgtgctgagcgtgttcggcgcgaatctgagcctgtcggcggcgcagctccagcacttgctggagcagatgggagccgcctcccgcgtgggcgtcccggagcctggccagctgcacttcaaccagtgtttaactgctgaagagatcttttcccttcatggcttttcaaatgctacccaaataaccagctccaaattctctgtcatctgtccagcagtcttacagcaattgaactttcacccatgtgaggatcggcccaagcacaaaacaagaccaagtcattcagaagtttggggatatggattcctgtcagtgacgattattaatctggcatctctcctcggattgattttgactccactgataaagaaatcttatttcccaaagattttgaccttttttgtggggctggctattgggactcttttttcaaatgcaattttccaacttattccagaggcatttggatttgatcccaaagtcgacagttatgttgagaaggcagttgctgtgtttggtggattttacctacttttcttttttgaaagaatgctaaagatgttattaaagacatatggtcagaatggtcatacccactttggaaatgataactttggtcctcaagaaaaaactcatcaacctaaagcattacctgccatcaatggtgtgacatgctatgcaaatcctgctgtcacagaagctaatggacatatccattttgataatgtcagtgtggtatctctacaggatggaaaaaaagagccaagttcatgtacctgtttgaaggggcccaaactgtcagaaatagggacgattgcctggatgataacgctctgcgatgccctccacaatttcatcgatggcctggcgattggggcttcctgcaccttgtctctccttcagggactcagtacttccatagcaatcctatgtgaggagtttccccacgagttaggagactttgtgatcctactcaatgcagggatgagcactcgacaagccttgctattcaacttcctttctgcatgttcctgctatgttgggctagcttttggcattttggtgggcaacaatttcgctccaaatattatatttgcacttgctggaggcatgttcctctatatttctctggcagatatgtttccagagatgaatgatatgctgagagaaaaggtaactggaagaaaaaccgatttcaccttcttcatgattcagaatgctggaatgttaactggattcacagccattctactcattaccttgtatgcaggagaaatcgaattggagtaatagaaaatggaagatggtgttgttaataaaggcatttaatagataaaaacatctccaaaaaggattttgaagctgatcctatttagttaaaaagataattttgctttcaactgtaggtccagaaaactaattattggcatcagtctgtgaaatagtccattatttgttgttaaaaatgcttcaaaaggttttcagtgtcagtctgagatgcctggtatataggagcctttgggaaatacctatttttcagtattccatgcatattagatatcaccatgaagcaagagacatgcattctataatcatgtagacactcagactcaggggaaaatacaagttatatcctgaaagcctttaaaactctatggtaggatcaaagattcaaatggtttcagagaggttttatttcaattaatttgttctagtgctttcaagagcaagtacatcaaaatgtagaaggtaaaatgtatgcaacactaatataaattattccaagtctttaaggagccaaagaaaaaaaagatttctcacagctttttgttctgttttgtatttcaattaggaacttgcagtattattttgaaaaccattctaaaataataggagttaggaaataaataaagttttgctagccctgctaagttcaggcttagaggcttatcgctaagtataaacttcaccagattccacgaaaagctggatagctttttttctgacttatgttgtggttgcacccctcacaaatggcagaacagtatgtaaagctggtaacacctcggtttcagtgcaccatgtgtttgctttgtgaaggtgaagaatatgttggtttagagaaagaaattggatgtaattttatgcaatttacttttaaagacaaacataactatttagcagagaatattttaataaatgcaaaacaacagctggactgctgtacatcaaggacagattaactggaaaacatatgttccttatgtgtgatcgagagccattcagaaaagacttcctttgtgttcagcctatacttttccatatggtataccttgaaaaaaattagcacaccatggttatttttctaccttttataaaagacagagcctgtttactcatttagaagatagagaaaattggtctaaaattgaacatcctagattcacactcccaagtcacttaaggtgatttgatggtgaggaaaatgattgacaaagcccaacaatgatctcaggaattacattttccaacagaccaaaaaatgttttcatgtagcagcaatgcagatttggtgaatatttaatatatattttagtatgtatttcactttatgactgacaattaaaaaatattgtttggccaaatagtaaacacccttttgaaacca

SEQ ID NO: 7048 - DNA, 3693 bp, Homo sapiens
tcggtttccctcctgctgtttgggggcatgaaagggcttcgccgccgggagtaaaagaaggaattgaccgggcagcgcgagggaggagcgcgcacgcgaccgcgagggcgggcgtgcaccctcggctggaagtttgtgccgggccccgagcgcgcgccggctgggagcttcgggtagagacctaggccgctggaccgcgatgagcgcgccgagcctccgtgcgcgcgccgcggggttggggctgctgctgtgcgcggtgctggggcgcgctggccggtcagacagcggcggtcgcggggaactcgggcagccctctggggtagccgccgagcgcccatgccccactacctgccgctgcctcggggacctgctggactgcagtcgtaagcggctagcgcgtcttcccgagccactcccgtcctgggtcgctcggctggacttaagtcacaacagattatctttcatcaaggcaagttccatgagccaccttcaaagccttcgagaagtgaaactgaacaacaatgaattggagaccattccaaatctgggaccagtctcggcaaatattacacttctctccttggctggaaacaggattgttgaaatactccctgaacatctgaaagagtttcagtcccttgaaactttggaccttagcagcaacaatatttcagagctccaaactgcatttccagccctacagctcaaatatctgtatctcaacagcaaccgagtcacatcaatggaacctgggtattttgacaatttggccaacacactccttgtgttaaagctgaacaggaaccgaatctcagctatcccacccaagatgtttaaactgccccaactgcaacatctcgaattgaaccgaaacaagattaaaaatgtagatggactgacattccaaggccttggtgctctgaagtctctgaaaatgcaaagaaatggagtaacgaaacttatggatggagctttttgggggctgagcaacatggaaattttgcagctggaccataacaacctaacagagattaccaaaggctggctttacggcttgctgatgctgcaggaacttcatctcagccaaaatgccatcaacaggatcagccctgatgcctgggagttctgccagaagctcagtgagctggacctaactttcaatcacttatcaaggttagatgattcaagcttccttggcctaagcttactaaatacactgcacattgggaacaacagagtcagctacattgctgattgtgccttccgggggctttccagtttaaagactttggatctgaagaacaatgaaatttcctggactattgaagacatgaatggtgctttctctgggcttgacaaactgaggcgactgatactccaaggaaatcggatccgttctattactaaaaaagccttcactggtttggatgcattggagcatctagacctgagtgacaacgcaatcatgtctttacaaggcaatgcattttcacaaatgaagaaactgcaacaattgcatttaaatacatcaagccttttgtgcgattgccagctaaaatggctcccacagtgggtggcggaaaacaactttcagagctttgtaaatgccagttgtgcccatcctcagctgctaaaaggaagaagcatttttgctgttagcccagatggctttgtgtgtgatgattttcccaaaccccagatcacggttcagccagaaacacagtcggcaataaaaggttccaatttgagtttcatctgctcagctgccagcagcagtgattccccaatgacttttgcttggaaaaaagacaatgaactactgcatgatgctgaaatggaaaattatgcacacctccgggcccaaggtggcgaggtgatggagtataccaccatccttcggctgcgcgaggtggaatttgccagtgaggggaaatatcagtgtgtcatctccaatcactttggttcatcctactctgtcaaagccaagcttacagtaaatattccccacctgactcttcctttccctacctttcattccacaaaattaagattcttggttatttgtatctaaacctgcaattatgttgaagacgacaccgtactcagtgtgtgcttccctcattcaccaagacccccatggatctcaccatccgagctggggccatggcacgcttggagtgtgctgctgtggggcacccagccccccagatagcctggcagaaggatgggggcacagacttcccagctgcacgggagagacgcatgcatgtgatgcccgaggatgacgtgttctttatcgtggatgtgaagatagaggacattggggtatacagctgcacagctcagaacagtgcaggaagtatttcagcaaatgcaactctgactgtcctagaaacaccatcatttttgcggccactgttggaccgaactgtaaccaagggagaaacagccgtcctacagtgcattgctggaggaagccctccccctaaactgaactggaccaaagatgatagcccattggtggtaaccgagaggcacttttttgcagcaggcaatcagcttctgattattgtggactcagatgtcagtgatgctgggaaatacacatgtgagatgtctaacacccttggcactgagagaggaaacgtgcgcctcagtgtgatccccactccaacctgcgactcccctcagatgacagccccatcgttagacgatgacggatgggccactgtgggtgtcgtgatcatagccgtggtttgctgtgtggtgggcacgtcactcgtgtgggtggtcatcatataccacacaaggcggaggaatgaagattgcagcattaccaacacagatgagaccaacttgccagcagatattcctagttatttgtcatctcagggaacgttagctgacaggcaggatgggtacgtgtcttcagaaagtggaagccaccaccagtttgtcacatcttcaggtgctggatttttcttaccacaacatgacagtagtgggacctgccatattgacaatagcagtgaagctgatgtggaagctgccacagatctgttcctttgtccgtttttgggatccacaggccctatgtatttgaagggaaatgtgtatggctcagatccttttgaaacatatcatacaggttgcagtcctgacccaagaacagttttaatggaccactatgagcccagttacataaagaaaaaggagtgctacccatgttctcatccttcagaagaatcctgcgaacggagcttcagtaatatatcgtggccttcacatgtgaggaagctacttaacactagttactctcacaatgaaggacctggaatgaaaaatctgtgtctaaacaagtcctctttagattttagtgcaaatccagagccagcgtcggttgcctcgagtaattctttcatgggtacctttggaaaagctctcaggagacctcacctagatgcctattcaagctttggacagccatcagattgtcagccaagagccttttatttgaaagctcattcttccccagacttggactctgggtcagaggaagatgggaaagaaaggacagattttcaggaagaaaatcacatttgtacctttaaacagactttagaaaactacaggactccaaattttcagtcttatgacttggacacatagactgaatgagaccaaaggaaaagc

SEQ ID NO: 7049 - DNA, 1762 bp, Homo sapiens
accgagcctggctctactgcaggcgctgggggttggggtgggggagaggcccagggcacatgatgccgcccccagcccgcccagcacatgacccaggcaggccggcggggtcctggcacacccgagccgcgtccgcgaacacagcccatggcctccccgcgcctagggaccttctgctgccccacgcgggacgcagccacgcagctcgtgctgagcttccagccgcgggccttccacgcgctctgcctgggcagcggcgggctccgcttggcgctgggccttctgcagctgctgcccggccgccggcccgcgggccccgggtcccccgcgacgtccccgccggcctcggtccgcatcctgcgcgctgccgctgcctgcgaccttctcggctgcctgggtatggtgatccggtccaccgtgtggttaggattcccaaattttgttgacagcgtctcggatatgaaccacacggaaatttggcctgctgctttctgcgtggggagtgcgatgtggatccagctgttgtacagtgcctgcttctggtggctgttttgctatgcagtggatgcttatctggtgatccggagatcggcaggactgagcaccatcctgctgtatcacatcatggcgtggggcctggccaccctgctctgtgtggagggagccgccatgctctactacccttccgtgtccaggtgtgagcggggcctggaccacgccatcccccactatgtcaccatgtacctgcccctgctgctggttctcgtggcgaaccccatcctgttccaaaagacagtgactgcagtggcctctttacttaaaggaagacaaggcatttacacggagaacgagaggaggatgggagccgtgatcaagatccgatttttcaaaatcatgctggttttaattatttgttggttgtcgaatatcatcaatgaaagccttttattctatcttgagatgcaaacagatatcaatggaggttctttgaaacctgtcagaactgcagccaagaccacatggtttattatgggaatcctgaatccagcccagggatttctcttgtctttggccttctacggctggacaggatgcagcctgggttttcagtctcccaggaaggagatccagtgggaatcactgaccacctcggctgctgagggggctcacccatccccactgatgccccatgaaaaccctgcttccgggaaggtgtctcaagtgggtgggcagacttctgacgaagccctgagcatgctgtctgaaggttctgatgccagcacaattgaaattcacactgcaagtgaatcctgcaacaaaaatgagggtgaccctgctctcccaacccatggagacctatgaaggggatgtgctgggggtccagaccccatattcctcagactcaacaattcttgttctttagaactgtgttctcaccttcccaacactgcactgccgaagtgtagcggcccccaaaccttgctctcatcaccagctagagcttcttcccgaagggcctttaggataggagaaagggttcatgcacacacgtgtgagaatggaagagccccctccagaccactctacagctgctctagccttagttgccactaggaagttttctgaggctggctgtaaagtaagtgtaaggtccacatccttggggaagtagttaaataaaatagttatgactgagctctcagcctgacttggattctgtcttaacacttctagcaaaagaaaataaatacatgtacagtta

SEQ ID NO: 7050 - DNA, 704 bp, Homo sapiens
ggacttagctctccttcagctttgtaaatggtttctctctctcatcccccagaagaaccagtgaagaaatccattcaggaatcagaagcttttttgcctcagagcatacctgaagagagatacaagatgaagagcaagcccctaggaatctgcctgataatcgattgcattggcaatgagacaggtaggtgtggaagctgcagattaactggtgcccccagattgagatcatggcacaggcaagctgtattcattggagtgatcagcaccaactgccgtgacaaaccagttcaagaatctgtgcttcatcctgggtgcggtggctcatgcctggaattccagcactttgtgaggctgagatgggaggatcacttgagcccagttaaaaattagctggtgtgggctcgggcacggtggcttacacctgtaatcccagcactttgggaggcggaggcgggcggatcatgaggtcaggagttcaagaccagcctggccaatatggtgaaaccccgtctctactaaaaatacaaaaattagctgggcatggtggtgggttcctgtagtcccagctacttgggaggctgaggcagaagaattgcttgaacctgggaggcagagcttgcagtgagccgagatcgcaccaccgcactgtagcctgggtgacagagcaagattctgtctcaaaaaaaaaaaaaattagctgg

SEQ ID NO: 7051 - DNA, 503 bp, Homo sapiens
agatgcaaaatgtgtctctggccagcaggaggaaggaagaggaagtgagagcagcggcagccggcggtgcagcagccggccgacccagagtggggcagagcagggagcacttataccatacaaggcagagaagatacagatcaagatatgcccaaggcccttctagttcagcctctccttggagtaggtatagacacgtgtggccgtttacgctgtaggatcctcattcccactggctttgaacattttggggacttacaatgccgccacccgcggacatcgtcaaggtggccatagaatggccgggcgcctaccccaaactcatggaaattgatcagaaaaaaccactgtctgcaataataaaggaagtctgtgatgggtggtctcttgccaaccatgaatattttgcactccagcatgccgatagttcaaacttctatatcacagaaaagaaccgcaatgagataaaaaatggcactatccttcgattaaccacatctcca

SEQ ID NO: 7052 - DNA, 3989 bp, Homo sapiens
gagaaatccatgactcacatatatcgtccgtcatccccagtcaagctcagggaggagggaggagcccagctggggcaggagaggggtgtctccccaccaaacaaacccggtccctccctctccgcactagctgtctgccctgccctgccgtaggagatgggctgggagcctcccacgctctccagctcactcggcaggcagcggggaccagggctggcaggttaagcctctgggggtggatcctgaaaggtggtccagccgcctggccctgcgtgggaccctccacctggcagcaggtacccaaacaagggctggacagcagggtctcgctctgtcacacaggctggagtgcagtggtgtgatcttggctcatcgtaacctccacctcccgggttcaagtgattctcatgcctcagcctcccgagtagctgggattacaggtggtgacttccaagagtgactccgtcggaggaaaatgactccccagtcgctgctgcagacgacactgttcctgctgagtctgctcttcctggtccaaggtgcccacggcaggggccacagggaagactttcgcttctgcagccagcggaaccagacacacaggagcagcctccactacaaacccacaccagacctgcgcatctccatcgagaactccgaagaggccctcacagtccatgcccctttccctgcagcccaccctgcttcccgatccttccctgaccccaggggcctctaccacttctgcctctactggaaccgacatgctgggagattacatcttctctatggcaagcgtgacttcttgctgagtgacaaagcctctagcctcctctgcttccagcaccaggaggagagcctggctcagggccccccgctgttagccacttctgtcacctcctggtggagccctcagaacatcagcctgcccagtgccgccagcttcaccttctccttccacagtcctccccacacggccgctcacaatgcctcggtggacatgtgcgagctcaaaagggacctccagctgctcagccagttcctgaagcatccccagaaggcctcaaggaggccctcggctgcccccgccagccagcagttgcagagcctggagtcgaaactgacctctgtgagattcatgggggacatggtgtccttcgaggaggaccggatcaacgccacggtgtggaagctccagcccacagccggcctccaggacctgcacatccactcccggcaggaggaggagcagagcgagatcatggagtactcggtgctgctgcctcgaacactcttccagaggacgaaaggccggagcggggaggctgagaagagactcctcctggtggacttcagcagccaagccctgttccaggacaagaattccagccaagtcctgggtgagaaggtcttggggattgtggtacagaacaccaaagtagccaacctcacggagcccgtggtgctcactttccagcaccagctacagccgaagaatgtgactctgcaatgtgtgttctgggttgaagaccccacattgagcagcccggggcattggagcagtgctgggtgtgagaccgtcaggagagaaacccaaacatcctgcttctgcaaccacttgacctactttgcagtgctgatggtctcctcggtggaggtggacgccgtgcacaagcactacctgagcctcctctcctacgtgggctgtgtcgtctctgccctggcctgccttgtcaccattgccgcctacctctgctccaggaggaaacctcgggactacaccatcaaggtgcacatgaacctgctgctggccgtcttcctgctggacacgagcttcctgctcagcgagccggtggccctgacaggctctgaggctggctgccgagccagtgccatcttcctgcacttctccctgctcacctgcctttcctggatgggcctcgaggggtacaacctctaccgactcgtggtggaggtctttggcacctatgtccctggctacctactcaagctgagcgccatgggctggggcttccccatctttctggtgacgctggtggccctggtggatgtggacaactatggccccatcatcttggctgtgcataggactccagagggcgtcatctacccttccatgtgctggatccgggactccctggtcagctacatcaccaacctgggcctcttcagcctggtgtttctgttcaacatggccatgctagccaccatggtggtgcagatcctgcggctgcgcccccacacccaaaagtggtcacatgtgctgacactgctgggcctcagcctggtccttggcctgccctgggccttgatcttcttctcctttgcttctggcaccttccagcttgtcgtcctctaccttttcagcatcatcacctccttccaaggcttcctcatcttcatctggtactggtccatgcggctgcaggcccggggtggcccctcccctctgaagagcaactcagacagcgccaggctccccatcagctcgggcagcacctcgtccagccgcatctaggcctccagcccacctgcccatgtgatgaagcagagattcggcctcgtcgcacactgcctgtggcccccgagcccggcccagccccaggccagtcagccgcagactttggaaagcccaacgaccatggagagatgggccgttgccatggtggacggactcccgggctgggcttttgaattggccttggggactactcggctctcactcagctcccacgggactcagaagtgcgccgccatgctgcctagggtactgtccccacatctgtcccaacccagctggaggcctggtctctccttacaacccctgggcccagccctcattgctgggggccaggccttggatcttgagggtctggcacatccttaatcctgtgcccctgcctgggacagaaatgtggctccagttgctctgtctctcgtggtcaccctgagggcactctgcatcctctgtcattttaacctcaggtggcacccagggcgaatggggcccagggcagaccttcagggccagagccctggcggaggagaggccctttgccaggagcacagcagcagctcgcctacctctgagcccaggccccctccctccctcagccccccagtcctccctccatcttccctggggttctcctcctctcccagggcctccttgctccttcgttcacagctgggggtccccgattccaatgctgttttttggggagtggtttccaggagctgcctggtgtctgctgtaaatgtttgtctactgcacaagcctcggcctgcccctgagccaggctcggtaccgatgcgtgggctgggctaggtccctctgtccatctgggcctttgtatgagctgcattgcccttgctcaccctgaccaagcacacgcctcagaggggccctcagcctctcctgaagccctcttgtggcaagaactgtggaccatgccagtcccgtctggtttccatcccaccactccaaggactgagactgacctcctctggtgacactggcctagggcctgacactctcctaagaggttctctccaagcccccaaatagctccaggcgccctcggccgcccatcatggttaattctgtccaacaaacacacacgggtagattgctggcctgttgtaggtggtagggacacagatgaccgacctggtcactcctcctgccaacattcagtctggtatgtgaggcgtgcgtgaagcaagaactcctggagctacagggacagggagccatcattcctgcctgggaatcctggaagacttcctgcaggagtcagcgttcaatcttgaccttgaagatgggaaggatgttctttttacgtaccaattcttttgtcttttgatattaaaaagaagtacatgttcattgtagagaatttggaaactgtagaagagaatcaagaagaaaaataaaaatcagctgttgtaatcacctagcaaactgg

SEQ ID NO: 7053 - DNA, 1678 bp, Homo sapiens
accctctgaagatggtgactccctcctgagaagctggaccccttggtaaaagacaaggccttctccaagaagaatatgaaagtgttactcagacttatttgtttcatagctctactgatttcttctctggaggctgataaatgcaaggaacgtgaagaaaaaataattttagtgtcatctgcaaatgaaattgatgttcgtccctgtcctcttaacccaaatgaacacaaaggcactataacttggtataaagatgacagcaagacacctgtatctacagaacaagcctccaggattcatcaacacaaagagaaactttggtttgttcctgctaaggtggaggattcaggacattactattgcgtggtaaggattgcaaacctctacttcttgacaatatacactttagtggagtcaaagataggctcatcgtgatgaatgtggctgaaaagcatagagggaactatacttgtcatgcatcctacacatacttgggcaagcaatatcctattacccgggtaatagaatttattactctagaggaaaacaaacccacaaggcctgtgattgtgagcccagctaatgagacaatggaagtagacttgggatcccagatacaattgatctgtaatgtcaccggccagttgagtgacattgcttactggaagtggaatgggtcagtaattgatgaagatgacccagtgctaggggaagactattacagtgtggaaaatcctgcaaacaaaagaaggagtaccctcatcacagtgcttaatatatcggaaattgaaagtagattttataaacatccatttacctgttttgccaagaatacacatggtatagatgcagcatatatccagttaatatatccagtcactaatttccagaagcacatgattggtatatgtgtcacgttgacagtcataattgtgtgttctgttttcatctataaaatcttcaagattgacattgtgctttggtacagggattcctgctatgattttctcccaataaaagcttcagatggaaagacctatgacgcatatatactgtatccaaagactgttggggaagggtctacctctgactgtgatatttttgtgtttaaagtcttgcctgaggtcttggaaaaacagtgtggatataagctgttcatttatggaagggatgactacgttggggaagacattgttgaggtcattaatgaaaacgtaaagaaaagcagaagactgattatcattttagtcagagaaacatcaggcttcagctggctgggtggttcatctgaagagcaaatagccatgtataatgctcttgttcaggatggaattaaagttgtcctgcttgagctggagaaaatccaagactatgagaaaatgccagaatcgattaaattcattaagcagaaacatggggctatccgctggtcaggggactttacacagggaccacagtctgcaaagacaaggttctggaagaatgtcaggtaccacatgccagtccagcgacggtcaccttcatctaaacaccagttactgtcaccagccactaaggagaaactgcaaagagaggctcacgtgcctctcgggtagcatggagaagttgccaagagttctttaggtgcctcctgtcttatggcgttgcaggccaggttatgcctcatgctgacttgcag

SEQ ID NO: 7054 - DNA, 2760 bp, Homo sapiens
cttcgctttcagagcatcctcactccgcccagttcggtgccagctgcgtgggctccagcttcgatcgttttccttggaatgctccaaaactcagcagcgactaagggaattccattggaatttgccgggcgtgctctcaccccgcacggcacccgcgccgtcagtcctcggatcccatcacttcagcccgaagattgcaactttgcagagacgaagaaatagcatggcatgaaacatggctcagttctattacaaaagaaatgttaatgctccctatagagaccgcatccctctaaggatagtaagagcagaatcagaactctcgccatcagaaaaagcctacttgaatgctgtggaaaagggagattatgccagtgtcaagaaatccctagaggaagctgaaatttattttaaaatcaatattaattgcattgatcctctcggaagaactgctctcctcattgcaattgaaaatgagaacttggagctcatcgaactactcttaagctttaatgtctatgttggagatgctctattacatgctatcagaaaagaagtcgtcggagctgttgagctgttattgaaccacaaaaaacctagtggagaaaaacaggtgcctcctatactccttgataagcagttctctgaattcactccagacattacaccaatcattttggcagcccatacaaataattatgagataataaaactcttggttcagaaaggagtctcagtgcctcgaccccacgaggtccgctgtaactgtgtggaatgcgtgtccagttcagatgtggacagcctccgtcactcacgctccagactcaacatctacaaggccttggccagtccctctctcattgcactgtcaagcgaagatccttttctcacagcctttcagttaagttgggaacttcaggaactgagcaaggtggaaaatgaattcaagtcggagtatgaagagctgtcacggcagtgcaaacaatttgctaaggacctactggatcagacgagaagttccagagaactggaaatcattcttaattaccgagatgacaatagtctcatagaagaacaaagtggaaatgatcttgcaagactaaaattggccattaagtaccgtcaaaaagagtttgttgcccagcccaattgtcaacagctgctggcatctcgctggtacgatgagtttccaggctggaggagaagacactgggcagtgaagatggtgacatgtttcataataggacttctttttcctgtcttctctgtgtgctacctgatagctcccaaaagcccacttggactgttcatcaggaagccatttatcaagtttatctgccacacagcctcctatttgacttttttgttcctgctgctgcttgcctctcagcacatcgacaggtcagacttgaacaggcaaggtccaccaccaaccatcgtcgagtggatgatattaccgtgggtcctgggcttcatatggggagaaattaaacagatgtgggatggcggacttcaggactacatccatgattggtggaatctaatggactttgtaatgaactccttatatttagcaacaatctccttgaaaattgttgcatttgtaaagtacagtgcccttaatccacgagaatcatgggacatgtggcatcccactctggtggcagaggctttatttgctattgcaaacatcttcagttctctgcgtctgatctcactgtttactgcaaattctcacctgggacctctgcaaatatctctgggaagaatgctcctggacattttgaagtttctattcatatactgccttgtgttgctagcatttgcaaatggcctaaatcaattgtacttctattatgaagaaacgaaagggttaacctgcaaaggcataagatgtgaaaagcagaataatgcattttcaacgttatttgagacactgcagtccctgttttggtcaatatttgggctcatcaatttatatgtgaccaatgtcaaagcacagcatgaatttactgagtttgttggtgccaccatgtttgggacatacaatgtcatctctctggttgttctactcaacatgttaatagctatgatgaataattcttaccaactgattgctaggcgagctgctgataacttgagaagacatcaccaataccaagaagttatgaggaacctggtgaagcgatacgttgctgcaatgattagagatgctaaaactgaagaaggcctgaccgaagagaactttaaggaactaaagcaagacatttctagtttccgctttgaagtcctgggattactaagaggaagcaaactttccacaatacaatctgcgaatgcctcgaaggagtcttcaaattcggcagactcagatgaaaagagtgatagcgaagaagaagttgctcgtcaacaggctgcaggaccacttgagagaaatattcaactggaatctcgaggattagcttcacggggtgacctgagcattcccggtctcagtgaacaatgtgtgttagtagaccatagagaaaggaatacggacacactggggttacaggtaggaaagagagtgtgtccattcaagtcagagaaggtggtggtggaggacacggttcctataataccaaaggagaaacatgcaaaagaagaggactctagtatagactatgatctaaacctcccagacacagtcacccacgaagattacgtgaccacaagattgtgatacttgaaggaggaagcgtttaccatacacatacgtat

SEQ ID NO: 7055 - DNA, 1794 bp, Homo sapiens
aacctgagccccagggaggcggcgcggagcgaccctggcagagctggcgcaaacagggcgagaggtcgctgggcagcgttcgaggaccagagggagctcggccacagaagaccccagtgatctgatcccgggatcccggctccaagctctcctcgcattttacagatttcacccccgcgactatctccccaaaacggagcctttatatcaagagaaggtgcgggagctggggcaaccaggactttctcgggcacccaagatgcgctccattaggaagaggtggacgatctgcacaataagtctgctcctgatcttttataagacaaaagaaatagcaagaactgaggagcaccaggagacgcaactcatcggagatggtgaattgtctttgagtcggtcacttgtcaatagctctgataaaatcattcgaaaggctggctcttcaatcttccagcacaatgtagaaggttggaaaatcaattcctctttggtcctagagataaggaagaacatacttcgtttcttagatgcagaacgagatgtgtcagtggtcaagagcagttttaagcctggtgatgtcatacactatgtgcttgacaggcgccggacactaaacatttctcatgatctacatagcctcctacctgaagtttcaccaatgaagaatcgcaggtttaagacctgtgcagttgttggaaattctggcattctgttagacagtgaatgtggaaaggagattgacagtcacaattttgtaataaggtgagctttcttctgctttttgagattgtaagtttttcaaagatattttacttgggggtggaaaactgttagaaaattttaaagtattactaaaacctcaaacaaatatttgtctatgatatccttttctgtgcaacatttaaattacatttaccctggaatagaatattataattattgcgtagttgaaagaaaaagtgatcctgtcatagcaacaagattcacacagctttttttggtgaggtgaggggggaggcaaatggcaattttattaaatttaatattccacacaaacttttttcttagtatctcttcttcatactcattagttttgtgtgattttatttgttgtataaagattatgaatattactatggaatgatgtaatagatttatgttaatgttactttttattaataattatctaggagatagtaagaacatagtttagcaagtttatatttgatatcctgagccatatttctttaatttctctttatatgtggtatttgtgtatgttagtatatttgaattttatgtttttttaacataattaagcgtgcatgtttgtttttcattaacggttaaaagatatttgatgaattgtgtgtttgattaacctattaactgaaaaaaactcaacagtagaaatggaattataatcacatcataaatataagcagtttttaatgatcaatttttatatctgtacagtttttttggattgttttagttccttagaaaaattagctaaatgacagaaacatggatattgaaatatgaaatagtacaatataaagatagatagaaaagtatgctgagttgacatgttgaaaaacacagtctcttgaagatatactggaatacattatttttgaatattttgaatattttttgaatatttttaaataaagtcttaaaagcataaataggtaactacttttaaaaaaaaagtcatgagaaatcacactcaagcattatcaagtgaagaaaattcataatagcaaataaaactgcaaacattttacctta

SEQ ID NO: 7056 - DNA, 617 bp, Homo sapiens
gtgtgcagtaaactggaatgctctccctcgctcactcctcagtgtaggagtgatctgaagcaggacaagctcagcctgcagctgccgtgggctttgtgtggactggacgcagagcttgggagacgggggagggctattactccaattcactgtcaatggaattacagctatagcggcagtgtatataggattgctttttctcgtcttcctggagatgctcagtcccagtatattttaaggaagagaaatataaaggaaatttagtatgcctccttttctttaaatgaagaatttagtttcctttacttcttaaaagagaatacctgttcttgtataacgtgactgcaccagacattctgaaaaatcagcaagaagcaaaagctggaaatagctatttcacagcaggtaatcatacctcaggatgtagctactgtacaaagtttatacttggataatcctggatgggaataaaggtagggggtaactgcctgaaaaacctattactatacaggccttagcatcatgaatgactttcttcatgaggatctgaagttactatctctgaccacattgcacagaagagccaataagaatttcaaagagggcaatttccacta

SEQ ID NO: 7057 - DNA, 2204 bp, Homo sapiens
cggcctcaccttttcctgcccgaagcagaagattctcgcagtcctggtttctccctccagaagaccccccacccaaatcctctgtagctcctggtagtgccctgacccctgctgccaccgtccttcagagagcaacggaagagcttcccggagggcgaggaaaagagggaaagtagccagcaatgtcgaacgcaatgtataataagatgtggcatcagacccaagaagccctcggtgctttactcgataaagagcctcagaagatgattgaaccacaaagaaatcaggttttcatctttcaaacattagccaccttctacgtaaagtatgtgcagatctttagaaacctagagaatgtctacgaccagttcgtccacccccagaaacgaatactgatcaggaaagtcctggacggggtgatgggccgcatcctggagctgaagaacgagatggtggagctggaactcacggagttccattatttcgatgatatcctgcaggatctcaagctggccccccaacaattagatattcccatacccaagtattttttgaaggagaagttggaagtaataaaaggaagagagaaaattcttgctcaaatattagcggacagcggaatagatacatctgacatgaaataccctgtaaagagtatccctttcgatgaggctgttaaattaatccagattgctgagagggcacggcaaggtcgcctaagggctttattcatgaagcaaatctatctgcaagaatatagagcaaagcaatccaagatgcttggcaagaaagtgacagatacctgggctgctgcactccgcattcagaaggtttggcgacgtttccatcaacgtaaggaaactgaaaaactgagagaagaggagatgatcttcctgggtatgaatccacctcctctctttaatgaagtcagtgctacagtaatccaggctgaaaaggtggaccgcctgcggaatgaggtgcagataaagcatgaagaggactacagggaagccctggttaccatcaagaatgacctaaagttgatagaaggcgtggatatcaaggagaaccttcaagaccagatccggcattggttcatcgaatgcagaaatttaaccgggacatttcctgactaccctgacgttgaagaaggagggtcagctattattttttctgacaagaccatacaacaggttattgaggatatcatagcaaaccaagaggaagaagaaaaaaacaaaaagaagaagaagaaaaaggaaaaacaacccaagaaagccaaaaaacaaaagaaaggaacaaaggagaaaaataaggaagaagacgaaaaatggaaaatgtcaccaagtctttttcttcctgcaatgaaggaaggatgtaacgcatacaaagaaatctggatgaaaaaagatgagtcttggaatttctctcaggactatgatccagaactgatcaaagaggagaaacgaaaagaattacagtcagagatcaggatacaggttgatgagttgatgagacaggaacttaaaaacttaaagctagctgtggacagagaaagggagcgcccagtgaaagcaggaaagaaaaaggacaagaagaaaggaaagaaaggcaaaaagaaagagaagaaggcaaagaaggataaagatctgacagctgacaggaccatcgagtctctgtataaggaactggtggaagaaggattactgatccaggctctgaaagtcaacctctctgattacattggtgagtacagctacctggggactactcttcgccaggtgtccatagaacccatgccctccctcctggatgtcagacagctcatcacattgtacggaatctggccattaggttctgcagcagtgcatgagaaagctcctttggtgaaatcgctactgttagccgggccgtctggggtagggaagaaaatgctggtccatgccatctgcaccgaaacgggagccaacctcttcaacttgtcctcctctaacattgctgggaaataccctggcaaaaatggcctccaaatgatgctgcatgcagtcttcaaggtggctcgacagctccagccctccgtggtgtggattgaagacacagaaaaaaccttctacaaaaaagttcccaacgcagaaaagatgttcactccctctgctggcgaagttgctgcattgcagaaaaacttgaaaaggtccacaagtagg

SEQ ID NO: 7058 - DNA, 2852 bp, Homo sapiens
gaggcccggaggaactcggagggggagggagagaaaggccgagacggagggagccagcggcggccgaggggctggtccaggcgcggccgctaagaggagaccaagaggcgggggctgcacttgacaaccagcatgccgagatggcacaccttgggcccaccccacctccacatagccttaattacaaatcagaggacaggcttagtgagcaagactggccagcatatttcaaggtcccatgttgtggggttgatacatctcaaattgagtcagaagaggcagaagtggatgtgagagaaagagagacacagagagacagagagccaaagagggcaagagacttgactttaagagactcctgtactgacaactccatgcagttcggaaccagaacgactacggctgaaccagggttcatggggacatggcaaaacgctgatactaacctcttattcagaatgtcccaacaggccatccgttgcacactggtaaactgcacatgtgaatgttttcagccagggaagattaacctgaggacttgtgatcagtgtaaacatggctgggtggcacatgccttggataagctcagcacgcagcacctgtaccaccccacccaagtggagattgtgcagtccaacgtcgtgtttgacatcagcagcctgatgctctatgggacacaagcagtgcctgtgcggctaaagatcctgctggaccgtctcttcagcgtcctgaagcaagaggaggtactgcacatactgcacggccttggctggactctgcgggactatgtccgaggatacatccttcaggatgctgctggcaaggtgctggaccgctgggccatcatgtctcgagaagaggaaatcatcacccttcagcagtttctgcggtttggagaaaccaaatccattgtggagctgatggcaattcaggagaaagaagggcaggccgtggctgtaccatcttcaaagacagactcagatataaggactttcattgagagcaataatcgcaccaggagtcccagcctccttgctcacttagagaacagcaatccttccagcattcatcacttcgaaaacatcccaaacagccttgcatttctgcttccattccagtacataaaccctgtctcagcaccactgctagggttgcctccaaatgggctactgttagagcaaccagggttgaggctgcgggaacccagcctttcaactcagaatgaatataatgagagcagcgaatccgaagtttctcccacaccttataagaatgatcaaacacccaatagaaatgccctgaccagcattactaatgtggagcccaaaaccgagccagcctgtgtctctcccattcagaattctgccccagtcagtgatctaaccaaaactgaacacccaaaaagctcattccggattcatcggatgagaaggatggggtcagcctctaggaaaggaagagtgttctgtaatgcatgtgggaagacattctatgacaaaggtactctcaaaattcattacaatgctgttcacctgaagatcaaacatcgatgcaccattgaaggttgcaacatggtctttagctccctccgaagtcgtaatcgccacagtgcaaaccccaatcctcgccttcacatgcctatgctaaggaataaccgagataaagatttaattcgggccacctcaggagctgccacccctgtcatagcaagtacaaaatcaaatctggcactcacaagccctggccgacccccaatgggttttaccactccccctctagaccctgtcttgcaaaatcctctccctagccagctagtattttctgggctaaagactgtacaaccagttcctccattttatagaagtttactcactccaggggaaatggtgagtcctccaacctccctcccaaccagtcccatcattccaaccagtggtaccatagagcagcaccccccgccaccctctgagccagtagtgccagcagtgatgatggccacccatgagcccagtgctgacctggcacccaagaaaaagcccaggaagtcaagcatgcctgtgaagattgagaaggaaattattgataccgccgatgagtttgatgatgaagatgatgaccccaatgatggtggagctgtggtcaatgacatgagccatgacaatcattgtcactcccaagaggagatgagcccaggcatgtctgtgaaggacttttctaagcataacaggacccggtgcatttcaaggactgaaataaggagggccgacagcatgacttctgaagaccaagaacctgagcgggactatgagaacgagtctgagtcttcggagcccaaactgggcgaggaatccatggaaggggatgagcacattcacagcgaagtgagtgaaaaagtcctgatgaatagtgagaggcctgatgagaaccacagtgagccctctcaccaggacgtcatcaaggtgaaggaagaatttacagaccccacttacgacatgttttacatgagccagtatggactgtacaatggtgggggtgccagcatggccgccttgcatgagagctttacatcgtctctgaattatggcagccctcaaaagttctccccagaaggtgacctatgttctagcccagaccccaaaatctgttatgtgtgcaagaagagtttcaaaagctcctacagtgtgaaacttcactacaggaacgttcacttgaaagagatgcacgtctgcacagtggctggttgcaatgctgcattcccctctcgccgaagccgagacagatactgggagaagagcaatgagcaaaacggtctccttgtatcatggggagagactctgtcaagcctaaagtga

SEQ ID NO: 7059 - DNA, 569 bp, Homo sapiens
aggggcaaggctactcaaggagagtaggaggaggctaggtcaggaagggcaagcactggtggcctacccaggacttggcccaaccctctgggtcaggtcaccctcgtcggagtgagcggaccccgctggaattggagcccagtaaggtctatgagtttggtgttttgatcctggctacccatcccttccatcccaggggtggttcaccaggctgagtggagccttatactagggagagaggaagctgaagaactgggctccagggactgtgaggggcgcttctgactttggacttgagcactgcctgggacctgtgctgagagagcgctagcatgtctcagtggaatcaagtccaacagttagaaatcaagtttttggagcaggtggatcaattctatgatgacaactttcccatggaaattcggcatctgttggcccaatggattgaaaatcaagactgggaggcagcttctaacaatgaaaccatggcaacgattcttcttcaaaacttgttaatacaactggatgaacagttaggtcgtgtttccaaagagaaaaacctactcttg

SEQ ID NO: 7060 - DNA, 2806 bp, Homo sapiens
cgggactgactttggctcttcagtgtttgcgcatgcgcgtaacgtcctgaggcggtgggtggtatattaggcgaagaggcggggtcgcccaagctgccgcgctggcattttctcctggacaaggagagagtgcggctgctgagagccgagcccagcaatcccgatcctctgagtcgtgaagaagggaggcagcgagggggttggggttggggcctgaggcaaggctccgctcttgccagagggacaggagccatggctcagaaaatggactgtggtgcgggcctcctcggcttccaggctgaggcctccgtagaagacagcgccttgcttatgcagaccttgatggaggccatccagatctcagaggctccacctactaaccaggccaccgcagctgctagtccccagagttcacagcccccaactgccaatgagatggctgacattcaggtttcagcagctgccgctaggcctaagtcagcctttaaagtccagaatgccaccacaaaaggcccaaatggtgtctatgatttctctcaggctcataatgccaaggatgtgcccaacacgcagcccaaggcagcctttaagtcccaaaatgctaccccaaagggtccaaatgctgcctatgatttttcccaggcagcaaccactggtgagttagctgctaacaagtctgagatggccttcaaggcccagaatgccactactaaagtgggcccaaatgccacctacaatttctctcagtctctcaatgccaatgacctggccaacagcaggcctaagacccctttcaaggcttggaatgataccactaaggccccaacagctgatacccagacccagaatgtaaatcaggccaaaatggccacttcccaggctgacatagagaccgacccaggtatctctgaacctgacggtgcaactgcacagacatcagcagatggttcccaggctcagaatctggagtcccggacaataattcggggcaagaggacccgcaagattaataacttgaatgttgaagagaacagcagtggggatcagaggcgggccccactggctgcagggacctggaggtctgcaccagttccagtgaccactcagaacccacctggcgcaccccccaatgtgctctggcagacgccattggcttggcagaacccctcaggctggcaaaaccagacagccaggcagaccccaccagcacgtcagagccctccagctaggcagaccccaccagcctggcagaacccagtcgcttggcagaacccagtgatttggccaaacccagtaatctggcagaacccagtgatctggccaaaccccattgtctggcccggccctgttgtctggccgaatccactggcctggcagaatccacctggatggcagactccacctggatggcagaccccaccgggctggcagggtcctccagactggcaaggtcctcctgactggccgctaccacccgactggccactgccacctgattggccacttcccactgactggccactaccacctgactggatccccgctgattggccaattccacctgactggcagaacctgcgcccctcgcctaacctgcgcccttctcccaactcgcgtgcctcacagaacccaggtgctgcacagccccgagatgtggcccttcttcaggaaagagcaaataagttggtcaagtacttgatgcttaaggactacacaaaggtgcccatcaagcgctcagaaatgctgagagatatcatccgtgaatacactgatgtttatccagaaatcattgaacgtgcatgctttgtcctagagaagaaatttgggattcaactgaaagaaattgacaaagaagaacacctgtatattctcatcagtacccccgagtccctggctggcatactgggaacgaccaaagacacacccaagctcggtctcctcttggtgattctgggtgtcatcttcatgaatggcaaccgtgccagtgaggctgtcctctgggaggcactacgcaagatgggactgcgtcctggggtgagacatcccctccttggagatctaaggaaacttctcacctatgagtttgtaaagcagaaatacctggactacagacgagtgcccaacagcaaccccccggagtatgagttcctctggggcctccgttcctaccatgagactagcaagatgaaagtgctgagattcattgcagaggttcagaaaagagaccctcgtgactggactgcacagttcatggaggctgcagatgaggccttggatgctctggatgctgctgcagctgaggccgaagcccgggctgaagcaagaacccgcatgggaattggagatgaggctgtgtctgggccctggagctgggatgacattgagtttgagctgctgacctgggatgaggaaggagattttggagatccctggtccagaattccatttaccttctgggccagataccaccagaatgcccgctccagattccctcagacctttgccggtcccattattggtcctggtggtacagccagtgccaacttcgctgccaactttggtgccattggtttcttctgggttgagtgagatgttggatattgctatcaatcgcagtagtctttcccctgtgtgaggctgaagcctcagattccttctaaacacagctatctagagagccacatcctgttgactgaaagtggcatgcaagataaatttatttgctgttccttgtctactgctttttttccccttgtgtgctgtcaagttttggtatcagaaataaacattgaaattgcaaagtgaa

SEQ ID NO: 7061 - DNA, 2515 bp, Homo sapiens
cagccgccggcggcgctagcacctcggagtcgggcggccggagcagcggagcgcagcgcggcgcagggaacggcactgggggtggggagaccagcccggccgagccgagggccaccccctggtcctctgccctcgcgccccgctagggccaggtgcacaaaaagctttaaacaagttaaaatctaggcaacagactccctgaagtgttgactgcccaacttaatcatgactgtgattcaaaaatgttaataaataaaccaaggtgtagatcatggggaattcatatgctgggcaactgaaatctgctcgatttgaggaagctctccacaactccatagaagcctccctcagatgtagtagtgtggtaccacggccaattttttcccagctatacctggaccctgaccagcatcctttctcatctgcagatgtcaaacccaaggtggaggatctggacaaagatttggtaaaccgctacactcaaaatggaagtctggatttttctaacaatctaacagttaatgaaatggaagatgatgaagacgatgaagaaatgtctgattcaaacagcccaccaattccctattcacaaaaacctgccccagaaggatcttgcactacagatggtttttgtcaagcaggaaaggatttgcgtttggtatcactgtgtatggaacaaattgacatcccagcaggattcctcctggtgggggccaagtctcccaatctgcctgaacacatcctagtttgtgctgtggacaagcgatttctaccagatgatcatggaaaaaatgcacttttagggttttctggaaattgtatcggctgtggagaaagaggatttcgatatttcacggaattttccaaccacattaacttgaagctcaccactcagccaaagaagcagaagcacttaaagtactacctagtcagaagctcccagggtgtactgtctaaaggacctcttatctgctggaaagaatgtagaagccgacaatcctctgcttcttgccactctattaagccaagctcttcagtgtcgtcaactgtgaccccagaaaatgggacaactaatggatacaaatcaggattcactcagacagatgctgctaatggaaacagtagccatggagggaagggcagtgcatccagctccactccagcccacacagggaattactctttgtcaccacgacctagctatgcatcaggagatcaagctaccatgttcatttctgggccaccaaagaaacgacaccggggatggtatcctgggtcacctctcccccaacctggcttagttgtacctgtccctacagttcgccctctttcaagaacggagccccttttatctgccccagttccacagaccccactaactggaattttacaacccaggcccattcctgcaggggaaactgtaattgttcctgaaaacctgctgagtaactcaggagttagaccagtaattctgataggctatggcactttaccctatttctatggaaatgttggtgacattgttgtgagtcctctgctggtgaattgctacaagattccacagttggaaaacaaagatttggaaaaattagggttgaccggcagccaatttctgagcgtggaaaacatgattcttctgacgatacagtatcttgtgcggctgggtcctgatcaggtacctctcagggaagaatttgagcaaattatgctgaaagctatgcaagaatttactctgagagaaagagccctgcagataggtgctcagtgtgtccctgtgtcaccaggacaactcccctggcttgctagattaattgccagcgtatctcaagacttggttcatgtggttgtgacccagaactctttggcggagggcatttcagagaccttaaggactctcagtgaaatgagacactatcaaaggctgccagattatgtggtggtaatttgtgcatcgaaaatcagaggaaatgaattttgtgtggtagtgttaggtcagcaccagtcccgagctctggcagagagcatgctcaccacaagtgagtttttgaaagaaattagttatgagcttatcacaggaaaggtcagtttcctggcatcacatttcaaaaccacatcattaggcgatgacctagacaagctgctggaaaaaatgcaacaaagaagaggagacagtgtggttacccctttcgatggagaccttaatgaatgtgtgtcaccccaggaggctgctgctatgattcccacacaaaacctggatttagataatgaaaccttccacatttatcaaccgcagctaacagttgccagaaaactcttatcccaggtgtgtgctatagcggacagtggcagccagagcctggacctcggtcacttcagcaaagtagacttcatcatcattgttcccagatcggaggtgttggttcagcaaactcttcagcggattcgacaatcaggttccagtccaggttcacacattgcattcagttatgtcctcttcatctcctgcaatctatga

SEQ ID NO: 7062 - DNA, 3529 bp, Homo sapiens
acacatactttgatgccaactacagcaagttgcaagaccatttctctgctgaaactcctttattctgttagtttgcagaattactctcctatgatggcacagaaatcacaaggatctgacaaccttcaggaaggccaggaaaagagcaagagagagatcctgaagtgcaccaaaagcgcgtgggctccgctggatgagtggctgccccctgaccctgaggaggaaagccagagtctcaccatccccatgctggaagattccaagcaagaaagtattcagcagtggctggactctggattctttgtctctgcaaatgaaaactttcaacaagtcattgaccgcactgtttctttgtatgaacaagggatggttcaaatgactgtgaaagactacatgagatctttgcatcagttttcagaaactcccatcctatccagagggaccagtttcaactcttgctattctactgcaagtgtaccacaaagcattcctgaatggctggaattttgggagatagatccagtggagattctcttggatctggggtttggtgctgatgagccagacatctgcatgcaaatcccagccagattccttggttgtggctcagcagccagaggaatcaacatccgtgtttttcttgaagctcaaaagcagcgaatggacattgagaaccccaacttgtacggtcgtttccgacagctggaaatcctggaccatgtgaccaatgccttctcatctctgctgagtgatgtcagcatcctgccaaacagagctgaagagaaagctggaggagagagtgtgcaaagaacctcagtgagtgccgccaaagagcatcgaagaagaatgggtaaactcttaaggagagcttccaaacagaacatcaggcgggattgtaacccagaggtatcagagtccttcaaggtgaaggatgaagtttttgttccctttacaaaaccatgggattgtggagcagagctagcagcaacctcaatcaaccacaagcaaaatcatttgtctctgtcagtagaacatcagtctctccaagcctgtgatgatttgctaccttatcctcctcatggtcttctgagcaagcagtggccttgctcatctatgccggccaagcaggctcctccttcctgtgtgtctgaggggtcagtcaagggcagaactcagaaggagaacttatttcagactaacaagctcaagagcttgtctcatcttgcaggcaaaggaccagactcatttgaaatggaagaggtccaaagctttgaagaagagactggtaatcctcttgacatgacttcaggaactgtaggtgccagggtggacagagcaaatagctgccagtctgacagcagcgggttcctggaggagccgctggaaccgctgcccctccagatgccttccttgccaaacagccagagtcctgctgagaatggaggtagaaagccaagagatcagagccacagcttagtatcatcccaggactgtcagctagagtcggatgggccagattccaaaagtagggcgagcatgtctttttcaagccaagaagcgaatgccttggaacaaagggcctcagtatctgtgatggaggaagagtttctgcttgaggccatggaggggccaccagagctgtatatcccagacatggcctgtgccaagaccaccacgaggggagaatgcccaaggaaagacagccatctgtggcagcttctgccaatgccccatgctgagtatgaggtcaccagacccacagccacttccaaatatgatcatcctctggggtttatggtaacccacgtcacagaaatgcaggacagttttgtgaggcctgagggagctggcaaagtgcaaagccaccacaatgagtctcaaaggtcacctggaaatgatcatactcaagacaagttccttcatgttgactctgaggccccacgagaagaggaaagcagtggattctgtcctcacaccaaccacagcttactcgtaccagaaagctcatcacagtgtatccccaagcacagtgaaatcacaccttatgcaactgaccttgctcaaacatctgaaaagctcattccccacctccataaactgcctggagatcctgcccaggtgaagtcaaggtctggtactttgggtcagatactacctgggacagaagctgagatggaaaaccttcctctaaatactggcagctccaggtctgtaatgacccagatgtcctccagcctggtgtcggctgctcagagggctgtggccttggggactggtcccagaggaacatctttagaatgcactgtgtgtgatcctgttaccgcaacagaaacaagactggggacaaaagcaagacagttaaatgatgcttccattcagacttcagctctaagcaacaagaccttgacacatgggccccagcccctcaccaaatccgtctctctagactcaggcttctctagtatctgcccaatgggcacctgccatgctatacctgcccactgctgcatctgctgtcatcaccaccctcactgccacggggagaggcaaagccctggccctgaaccctcagtctgtaggcactgcctgtgttcactaactggtcaccaggaagcccagttcatgacgactttgaaagcccttcaggacactacagtgagggagctatgttcctgcacagtccatgagatggaagccatgaagacgatatgccaaagtttccgggagtatttagaagaaattgaacagcaccttatgggacagcaggccctcttttccagggacatgtcagaggaggaaagggaggaggccgagcaactgcaaacgttacgtgaggccctgaggcagcaggtggcagagttggaatttcagttaggagaccgggctcagcaaatcagagaagggattttactgcagctggaggttctcacagcagagccacctgaacactattcaaatctgcatcaatataactggatagaagaaagcaatgggcagacttcatgttctaaaatccacccaggcatggccccgaggactgtgtttcctcccgatgatggccaggaggctccctgttcaggtgaattattgtctgcagagctggatcccttttttttttcttcaaaagcaaataactctgctaaagatgaaaaaataaaatcaaaagactttctgaagacacaagactctggtctgttgtaattgtttttctttgttgagaaaataatcagtttccagagtataacacatgtcgaacaaaatagaacatttgtaaagaggttagagtatcaaagtggtgcccctttgagaagaaaaagttttagagtgttttcatgtggaatggtgggttgcatacgtaatttcaaattgtaatttaaaacaacaaattgttcatgatgtgcgagaattgtaggttattaaaagccttgttaaattgtttttcttgaaaattgagagaacaggaacagaagccaaaatatggacggcacctttctctagcccaaactcagcctctaattgcctgatctta

SEQ ID NO: 7063 - DNA, 863 bp, Homo sapiens
ggggaggaggcggttgcggttagtggaccgggaccggtaggggtgctgttgccatcatggctgaccccgacccccggtaccctcgctcctcgatcgaggacgacttcaactatggcagcagcgtggcctccgccaccgtgcacatccgaatggcctttctgagaaaagtctacagcattctttctctgcaggttctcttaactacagtgacttcaacagtttttttatactttgagtctgtacggacatttgtacatgagagtcctgccttaattttgctgtttgccctcggatctctgggtttgatttttgcgttgattttaaacagacataagtatccccttaacctgtacctactttttggatttacgctgttggaagctctgactgtggcagttgttgttactttctatgatgtatatattattctgcaagctttcatactgactactacagtattttttggtttgactgtgtatactctacaatctaagaaggatttcagcaaatttggagcagggtaagttttttttttttatagtgagataatggagttggtcttagccgctgcaggagcccttcttttctgtggattcatcatctatgacacacactcactgatgcataaactgtcacctgaagagtacgtattagctgccatcagcctctacttggatatcatcaatctattcctgcacctgttacggtttctggaagcagttaataaaaagtaattaaaagtatctcagctcaactgaagaacaacaaaaaaaatttaatgagaaaaaaggattaaagtaattggaagcagtatatagaaactgtttcattaagtaataaagtttgaaacaatgattaaatac

SEQ ID NO: 7064 - DNA, 498 bp, Homo sapiens
atggtggccacgtgcctgcaggtggtgggcttcgtcacgagcttcgtgggctggatcggggtcatcgtgaccacctccaccaatgactgggtggtgacctgcggctacaccatccccacctgccgcaagctggatgagctgggctccaaggggctgtgggccgactgcgtcatggccacggggctgtaccactgcaagcccctggtggacatcctcatcctgccgggctacgtgcaggcctgccgcgccctgatgattgctgcctcggtcctgggtctgccggccattttactgctgctgactgttcttccctgcatccggatgggccaggagcccggtgtggctaagtacaggcgggcccagctggctggtgttttgctcattctgctgggctgtcagcttctttgggcaaagactgagtcatctctgcattctcagcacctggtgcaatttaagcagaaatatcttgaagatttttcgtatcttcagggagattag

SEQ ID NO: 7065 - DNA, 835 bp, Homo sapiens
gcattttccaggattttcaagtcttcgatgctgtcatgttgagagtccactatccacgtttgtttatccaggaataatgcagaaaatctgagcattcgtgaatctaatcattgagatacttcattttcttagcgtttctggagattacaacatcctgcggttccgtttctgggaactttactgatttatctcccccctcacacaaataagcattgattcctgcatttctgaagatctcaagatctggactactgttgaaaaaatttccagtgaggctcacttatgtctgtaaagatgggaaaaaaatacaagaacattgttctactaaaaggattagaggtcatcaatgattatcattttagaatggttaagtccttactgagcaacgatttaaaacttaatttaaaaatgagagaagagtatgacaaaattcagattgctgacttgatggaagaaaagttccgaggtgatgctggtttgggcaaactaataaaaattttcgaagatataccaacgcttgaagacctggctgaaactcttaaaaaagaaaagttaaaagtaaaaggaccagccctatcaagaaagaggaagaaggaagtggatgctacttcacctgcaccctccacaagcagcactgtcaaaactgaaggagcagaggcaactcctggagctcagaaaagaaaaaaatcaaccaaagaaaaggctggacccaaagggagtaaggtgtccgaggaacagactcagcctccctctcctgcaggagccggcatgtccacagccatgggccgttccccatctcccaagacctcattgtcagctccacccaacagttctt

SEQ ID NO: 7066 - DNA, 2709 bp, Homo sapiens
tgctccaaaactcagcagcgactaagggaattccattggaatttgccgggcgtgctctcaccccgcacggcacccgcgccgtcagtcctcggatcccatcacttcagcccgaagattgcaactttgcagagacgaagaaatagcatggcatgaaacatggctcagttctattacaaaagaaatgttaatgctccctatagagaccgcatccctctaaggatagtaagagcagaatcagaactctcgccatcagaaaaagcctacttgaatgctgtggaaaagggagattatgccagtgtcaagaaatccctagaggaagctgaaatttattttaaaatcaatattaattgcattgatcctctcggaagaactgctctcctcattgcaattgaaaatgagaacttggagctcatcgaactactcttaagctttaatgtctatgttggagatgctctattacatgctatcagaaaagaagtcgtcggagctgttgagctgttattgaaccacaaaaaacctagtggagaaaaacaggtgcctcctatactccttgataagcagttctctgaattcactccagacattacaccaatcattttggcagcccatacaaataattatgagataataaaactcttggttcagaaaggagtctcagtgcctcgaccccacgaggtccgctgtaactgtgtggaatgcgtgtccagttcagatgtggacagcctccgtcactcacgctccagactcaacatctacaaggccttggccagtccctctctcattgcactgtcaagcgaagatccttttctcacagcctttcagttaagttgggaacttcaggaactgagcaaggtggaaaatgaattcaagtcggagtatgaagagctgtcacggcagtgcaaacaatttgctaaggacctactggatcagacgagaagttccagagaactggaaatcattcttaattaccgagatgacaatagtctcatagaagaacaaagtggaaatgatcttgcaagactaaaattggccattaagtaccgtcaaaaagagtttgttgcccagcccaattgtcaacagctgctggcatctcgctggtacgatgagtttccaggctggaggagaagacactgggcagtgaagatggtgacatgtttcataataggacttctttttcctgtcttctctgtgtgctacctgatagctcccaaaagcccacttggactgttcatcaggaagccatttatcaagtttatctgccacacagcctcctatttgacttttttgttcctgctgctgcttgcctctcagcacatcgacaggtcagacttgaacaggcaaggtccaccaccaaccatcgtcgagtggatgatattaccgtgggtcctgggcttcatatggggagaaattaaacagatgtgggatggcggacttcaggactacatccatgattggtggaatctaatggactttgtaatgaactccttatatttagcaacaatctccttgaaaattgttgcatttgtaaaggttatttgagacactgcagtccctgttttggtcaatatttgggctcatcaatttatatgtgaccaatgtcaaagcacagcatgaatttactgagtttgttggtgccaccatgtttgggacatacaatgtcatctctctggttgttctactcaacatgttaatagctatgatgaataattcttaccaactgattgctgaccatgcagatatagaatggaaatttgcacgaacaaagctttggatgagttattttgaagaaggaggtactctgcctactcccttcaatgtcatcccgagccccaagtctctctggtacctgatcaaatggatctggacacacttgtgcaagaaaaagatgagaagaaagccagaaagttttggaacaatagggaggcgagctgctgataacttgagaagacatcaccaataccaagtaagttgtccttgtactatgtcttgaaattttcactaaaataaaatgcagtccccccttcagaactgactcaggaggaaatttatttactcattgagtatcaatactcttgttctaaaatgcctcaggaagttatgaggaacctggtgaagcgatacgttgctgcaatgattagagatgctaaaactgaagaaggcctgaccgaagagaactttaaggaactaaagcaagacatttctagtttccgctttgaagtcctgggattactaagaggaagcaaactttccacaatacaatctgcgaatgcctcgaaggagtcttcaaattcggcagactcagatgaaaagagtgatagcgaagaagttgctcgtcaacaggctgcaggaccacttgagagaaatattcaactggaatctcgaggattagcttcacggggtgacctgagcattcccggtctcagtgaacaatgtgtgttagtagaccatagagaaaggaatacggacacactggggttacaggtaggaaagagagtgtgtccattcaagtcagagaaggtggtggtggaggacacggttcctataataccaaaggagaaacatgcaaaagaagaggactctagtatagactatgatctaaacctcccagacacagtcacccacgaagattacgtgaccacaagattgtgatacttgaaggaggaagcgtttaccatacacatacgtattttccgtagtgctctgggtggg

SEQ ID NO: 7067 - DNA, 1248 bp, Homo sapiens
cgccggccccaggcgggtgcgctgggagcctgggccgggagccgggtgagggcgccgagaggctcggtgggcgcgggcggcgagatatgccacacttctgcctgctgttggcaaccctcctggactaggctgctcttgttaatcacatggatgttatataagagttcggaccgcccagcacacaaggtcagcatgctgctcctctgtcacgctctcgctatagctgttgtccagatcgttatcttctcagaaagctgggcatttgccaagaacatcaacttctataatgtgaggcctcctctcgaccctacaccatttccaaatagcttcaagtgctttacttgtgaaaacgcaggggataattataactgcaatcgatgggcagaagacaaatggtgtccacaaaatacacagtactgtttgacagttcatcacttcaccagccacggaagaagcacatccatcaccaaaaagtgtgcctccagaagtgaatgtcattttgtcggttgccaccacagccgagattctgaacatacggagtgtaggtcttgctgtgaaggaatgatctgcaatgtagaattacccaccaatcacactaatgcagtgtttgccgtaatgcacgctcagagaacatctggcagcagtgcccccacactctacctaccagtgcttgcctgggtctttgtgcttccattgctgtgatgccaccattcctaggagaggcagagaccagcctctaaagcacaagccaaaaactgtgtgaacggtgaactttggagtgaagatcaatcttgcacttggtgaagagtgcacattggacctcaaggcgaaagccagtggtttgcttggataaaatgttcccgcatgaggccacaggactgaggatgggaatttggcagggcctgagaagatggtctgacttccaggcttcctggtcaaagagagctacgtttgggcagttctgcagagaggatcctggcaactagtcccacctgactaggcctttagctgaaaggatttcttgacctccttgactgcctcagaggctgccaggtcaaaccctcttgtttatgtgattagctcagagcatctctatgaaatctaacccttcccctcatgagaaagcagttttccccaccaacagcatagtcaatgagaaaggcaactgtacgaagaaaacttccagtggaactaatatgaaatctatttgcaaattatggggggaaataaagcttttaaattatacaa

SEQ ID NO: 7068 - DNA, 2486 bp, Homo sapiens
acacggagcggcgcccgggagctatgagccatgaagccgcccggcagcagctcgcggcagccgcccctggcgggctgcagccttgccggcgcttcctgcggcccccaacgcggccccgccggctcggtgcctgccagcgccccgcagctccgcattggaatgaaactgcagaaaaaaatttgggagtcctggcagatgaagacaatacattgcaacagaatagcagcagtaatatcagttacagcaatgcaatgcagaaagaaatcacactgccttcaagactcatatattacatcaaccaagactcggaaagcccttatcacgttcttgacacaaaggcaagacaccagcaaaaacataataaggctgtccatctggcccaggcaagcttccagattgaagccttcggctccaaattcattcttgacctcatactgaacaatggtttgttgtcttctgattatgtggagattcactacgaaaatgggaaaccacagtactctaagggtggagagcactgttactaccatggaagcatcagaggcgtcaaagactccaaggtggctctgtcaacctgcaatggacttcatggcatgtttgaagatgataccttcgtgtatatgatagagccactagagctggttcatgatgagaaaagcacaggtcgaccacatataatccagaaaaccttggcaggacagtattctaagcaaatgaagaatctcactatggaaagaggtgaccagtggccctttctctctgaattacagtggttgaaaagaaggaagagagcagtgaatccatcacgtggtatatttgaagaaatgaaatatttggaacttatgattgttaatgatcacaaaacgtataagaagcatcgctcttctcatgcacataccaacaactttgcaaagtccgtggtcaaccttgtggattctatttacaaggagcagctcaacaccagggttgtcctggtggctgtagagacctggactgagaaggatcagattgacatcaccaccaaccctgtgcagatgctccatgagttctcaaaataccggcagcgcattaagcagcatgctgatgctgtgcacctcatctcgcgggtgacatttcactataagagaagcagtctgagttactttggaggtgtctgttctcgcacaagaggagttggtgtgaatgagtatggtcttccaatggcagtggcacaagtattatcgcagagcctggctcaaaaccttggaatccaatgggaaccttctagcagaaagccaaaatgtgactgcacagaatcctggggtggctgcatcatggaggaaacaggggtgtcccattctcgaaaattttcaaagtgcagcattttggagtatagagactttttacagagaggaggtggagcctgccttttcaacaggccaacaaagctatttgagcccacggaatgtggaaatggatacgtggaagctggggaggagtgtgattgtggttttcatgtggaatgctatggattatgctgtaagaaatgttccctctccaacggggctcactgcagcgacgggccctgctgtaacaatacctcatgtctttttcagccacgagggtatgaatgccgggatgctgtgaacgagtgtgatattactgaatattgtactggagactctggtcagtgcccaccaaatcttcataagcaagacggatatgcatgcaatcaaaatcagggccgctgctacaatggcgagtgcaagaccagagacaaccagtgtcagtacatctggggaacaaaggctgcagggtctgacaagttctgctatgaaaagctgaatacagaaggcactgagaagggaaactgcgggaaggatggagaccggtggattcagtgcagcaaacatgatgtgttctgtggattcttactctgtaccaatcttactcgagctccacgtattggtcaacttcagggtgagatcattccaacttccttctaccatcaaggccgggtgattgactgcagtggtgcccatgtagttttagatgatgatacggatgtgggctatgtagaagatggaacgccatgtggcccgtctatgatgtgtttagatcggaagtgcctacaaattcaagccctaaatatgagcagctgtccactcgattccaaggatgaaggacccaaggcctgttttctgaagcggacgaagtgcaaatcatatccaaagcatagaaaatgtcaagaagagaaggttcgatcctactcagcaaggccccatctgaatcagctgcgctggatggacaccgccttgcactgttggattctgggtatgacatactcgcagcagtgttactggaactattaagtttgtaaacaaaacctttgggtggtaatgactacggagctaaagttggggtgacaaggatggggtaaaagaaaactgtctcttttggaaataatgtcaaagaacacctttcaccacctgtcagtaaacggggga

SEQ ID NO: 7069 - DNA, 594 bp, Homo sapiens
gggccagtcgtgcagaagccatgcccaccttgtggccgggatggagtggggactaggaaggcaccagccggggaggaccaggagtccatccagcccctgcttcggcactacagggccttcggtgtcagcgccatcctggactatggagtggaggaggacctgagccccgaggaggcagagcacaaggagatggagtcctgcacctcagctgcggagagggatggcagtggcacgaataagcgggacaagcaataccaggcccactgggccttcggggaccgcaggaatggtgtcatcagtgcccgcacctacttctacgccaatgaggccaagtgcgacagccacatggagacattcttgcgctgcatcgaagcctcaggtagagtcagcgatgacggcttcatagccattaagctcacagcactggggagaccccagtttctgctgcagttctcagaggtgctggccaagtggaggtgcttctttcaccaaatggctgtggagcaagggcaggcgggcctggctgccatggacaccaagctggaggtggcggtgctgcaggaaagtgtcgcaaagttgggcatcgcatccagg

SEQ ID NO: 7070 - DNA, 1123 bp, Homo sapiens
actcccaacagagcgcccaagaagaaaatggccataagtggagtccctgtgctaggatttttcatcatagctgtgctgatgagcgctcaggaatcatgggctatcaaagaagaacatgtgatcatccaggccgagttctatctgaatcctgaccaatcaggcgagtttatgtttgactttgatggtgatgagattttccatgtggatatggcaaagaaggagacggtctggcggcttgaagaatttggacgatttgccagctttgaggctcaaggtgcattggccaacatagctgtggacaaagccaacctggaaatcatgacaaagcgctccaactatactccgatcaccaatgacaagttcaccccaccagtggtcaatgtcacgtggcttcgaaatggaaaacctgtcaccacaggagtgtcagagacagtcttcctgcccagggaagaccaccttttccgcaagttccactatctccccttcctgccctcaactgaggacgtttacgactgcagggtggagcactggggcttggatgagcctcttctcaagcactgggagtttgatgctccaagccctctcccagagactacagagaatgtggtgtgtgccctgggcctgactgtgggtctggtgggcatcattattgggaccatcttcatcatcaagggagtgcgcaaaagcaatgcagcagaacgcagggggcctctgtaaggcacatggaggtgatgatgtttcttagagagaagatcactgaagaaacttctgctttaatgactttacaaagctggcaatattacaatccttgacctcagtgaaagcagtcatcttcagcgttttccagccctatagccaccccaagtgtggttatgcctcctcgattgctccgtactctaacatctagctggcttccctgtctattgccttttcctgtatctattttcctctatttcctatcattttattatcaccatgcaatgcctctggaataaaacatacaggagtctgtctctgctatggaatgccccatggggcatctcttgtgtacttattgtttaaggtttcctcaaactgtgatttttctgaacacaataaactattttgatgatcttgggtggaa

SEQ ID NO: 7071 - DNA, 1124 bp, Homo sapiens; identical to SEQ ID NO: 6440

SEQ ID NO: 7072 - DNA, 578 bp, Homo sapiens
aagtaacgatctggactcggttcgggccgtgaaagggagggatgcagacctagttgggaccgcagaaaggaaggatcgagaaatccttcagacggctcacctgttactcggcctcccagaaagatggataggagaaatgactacggatatagggtgcctctatttcagatatacagactgagaccacagaagaggacagtgtcctgctgatgcataccctgttggcggcaaccaaggactccctggccatggacccaccagttgtcaaccggcctaagaaaagcaagaccaagaaggcccctataaagactattactaaggctgcacctgctgcccctccagtcccagctgccaatgagattgccaccaacaagcccaaaataacttggcaggctttaaacctgccagtcattacccagatcagccaggctttacctaccactgaggtaaccaatactcaggcttcttcagtcactgctcagcctaagaaagccaacaagatgaagagagttactgccaaggcagcccaaggctcccaatccccaactggccatgagggtggcactatacagctgaag

SEQ ID NO: 7073 - DNA, 1420 bp, Homo sapiens; identical to SEQ ID NO: 6463

SEQ ID NO: 7074 - DNA, 5450 bp, Homo sapiens; identical to SEQ ID NO: 3810

SEQ ID NO: 7075 - DNA, 2635 bp, Homo sapiens
ggacccgcctcagccaatccgctgctgccggcgtcgggtgcgctcggcctcgcccgcggccctccttccccggctcccgctcgccgctcgttcactccaccgccgccgccgccgccgccgctgccgctgccgctgccgcacctccgtagctgactcggtactctctgaagatggcagaagctcaccaagctgtggcctttcagttcacggtcactccggacgggattgacctgcggctgagccatgaagctcttagacaaatctatctctctggacttcattcctggaaaaagaagttcatcagattcaagaacggcatcatcactggcgtgtacccggcaagcccctccagttggcttatcgtggtggtgggcgtgatgacaacgatgtacgccaagatcgacccctcgttaggaataattgcaaaaatcaatcggactctggaaacggccaactgcatgtccagccagacgaagaacgtggtcagcggcgtgctgtttggcaccggcctgtgggtggccctcatcgtcaccatgcgctactccctgaaagtgctgctctcctaccacgggtggatgttcactgagcacggcaagatgagtcgtgccaccaagatctggatgggtatggtcaagatcttttcaggccgaaaacccatgttgtacagcttccagacatcgctgcctcgcctgccggtcccggctgtcaaagacactgtgaacaggtatctacagtcggtgaggcctcttatgaaggaagaagacttcaaacggatgacagcacttgctcaagattttgctgtcggtcttggaccaagattacagtggtatttgaagttaaaatcctggtgggctacaaattacgtgagcgactggtgggaggagtacatctacctccgaggacgagggccgctcatggtgaacagcaactattatgccatggatctgctgtatatccttccaactcacattcaggcagcaagagccggcaacgccatccatgccatcctgctttacaggcgcaaactggaccgggaggaaatcaaaccaattcgtcttttgggatccacgattccactctgctccgctcagtgggagcggatgtttaatacttcccggatcccaggagaggagacagacaccatccagcacatgagagacagcaagcacatcgtcgtgtaccatcgaggacgctacttcaaggtctggctctaccatgatgggcggctgctgaagccccgggagatggagcagcagatgcagaggatcctggacaatacctcggagcctcagcccggggaggccaggctggcagccctcaccgcaggagacagagttccctgggccaggtgtcgtcaggcctattttggacgtgggaaaaataagcagtctcttgatgctgtggagaaagcagcgttctttgtgacgttagatgaaactgaagaaggatacagaagtgaagacccggatacgtcaatggacagctacgccaaatctctactacacggccgatgttacgacaggtggtttgacaagtcgttcacgtttgttgtcttcaaaaacgggaagatgggcctcaacgctgaacactcctgggcagatgcgccgatcgtggcccacctttgggagtacgtcatgtccattgacagcctccagctgggctatgcggaggatgggcactgcaaaggcgacatcaatccgaacattccgtaccccaccaggctgcagtgggacatcccgggggaatgtcaagaggttatagagacctccctgaacaccgcaaatcttctggcaaacgacgtggatttccattccttcccattcgtagcctttggtaaaggaatcatcaagaaatgtcgcacgagcccagacgcctttgtgcagctggccctccagctggcgcactacaaggacatgggcaagttttgcctcacatacgaggcctccatgacccggctcttccgagaggggaggacggagaccgtgcgctcctgcaccactgagtcatgcgacttcgtgcgggccatggtggacccggcccagacggtggaacagaggctgaagttgttcaagttggcgtctgagaagcatcagcatatgtatcgcctcgccatgaccggctctgggatcgatcgtcacctcttctgcctttacgtggtgtctaaatatctcgctgtggagtcccctttccttaaggaagttttatctgagccttggagattatcaacaagccagacccctcagcagcaagtggagctgtttgacttggagaataacccagagtacgtgtccagcggagggggctttggaccggttgctgatgacggctatggtgtgtcgtacatccttgtgggagagaacctcatcaatttccacatttcttccaagttctcttgccctgagacggggattataagtcaaggaccaagttcagatacttgagacaaagtggaaagtctcagcatatggaaacaaggccttggaggagaccatggacatcaccaagttcatgtgctgggctggaaagaaaagcctgttgattttcacttgctgtgcatttattcatccattccattgcctcaatgctgagaacagtgcctgacacataaaagatgctcaataaatatgttaaaagt

SEQ ID NO: 7076 - DNA, 6923 bp, Homo sapiens
ctttctctgattaaatttaatggaacccctggtagtcagctctctactccgcgctcaggcaagtcgccaagcccatcacccaccagcccaggaagcctgcggaagcagaggagctctcagcatggcggctcctctacgtcacttgcgtccaccaaagtctgcagctcgatggatgagaacgatggccctggagaagaagtgtcggaggaaggcttccagattccagctacaataacagaacgatataaagtcggaagaacaataggagatggaaattttgctgttgtcaaggaatgtgtagaaagatcgactgctagagagtatgctctgaaaattatcaagaaaagcaaatgtcgaggcaaagagcacatgatccagaatgaagtgtctattttaagaagagtgaagcatcccaatatcgttcttctgattgaggagatggatgtgccaactgaactgtatcttgtcatggaattagtaaaggggggagacctttttgatgccattacttccactaacaaatacaccgagagagacgccagtgggatgctgtacaacctagccagcgccatcaaatacctgcatagcctgaacatcgtccaccgtgatatcaagccagagaacctgctggtgtatgagcaccaagatggcagcaaatcactgaagctgggtgactttggactggccaccattgtagacggccccctgtacacagtctgtggcaccccaacatacgtggctccagaaatcattgcagagactggatacggcctcaaggtggacatctgggcagcaggtgtaatcacttatatcctgctgtgtggtttccctccattccgtggaagtggtgatgaccaggaggtgctttttgatcagattttgatggggcaggtggactttccttctccatactgggataatgtttccgattctgcaaaggagctcattaccatgatgctgttggtcgatgtagatcagcgattttctgctgttcaagtacttgagcatccctgggttaatgatgatggcctcccagaaaatgaacatcagctgtcagtagctggaaagataaagaagcatttcaacacaggccccaagccgaatagcacagcagctggagtttctgtcatagcactggaccacgggtttaccatcaagagatcagggtctttggactactaccagcaaccaggaatgtattggataagaccaccgctcttgataaggagaggcaggttttccgacgaagacgcaaccaggatgtgaggagccggtacaaggcgcagccagctcctcccgaactcaactcggaatcggaagactactccccaagctcctccgagactgttcgctcccctaactcgcccttttaataagacccttttactcaaagtcctagcttaaccctttgagactctgagatttttttcccccaaatttgtgtaaaacagtttcatctgatctatctagcgctcaatgcttgaatggcagaactgaaagtgttttcaggtatctttgtagcggtttccctttactgaataagatgacacgtggtgattgtgaagatggtaatttgctgctaatagagtcctcaaagggttaaggccaatttgcaatttttttttaaacttagaagcaatgaatgttttcatcagtcaagctaggatctgcagtatgtaatatagcacttgttaaccctctgagtgcatagaattttattgagaattcttgtttgggaatttttcaggcctttggatgtatacacacatgtttcttgattttactgcagatcaaggggtgttgttagatgctgaaatgtccagaaaagaaggacatttagaatgatatcttgtttgtccttttctgtgggtttagaacgtggcaggtttataacttcgacacacgcacggttctttcttcttcacaatcctattcagaaacagattttttttttcattagagatatgactgtcagttgcagtgagttctgcatcccaagtggagggaattgggtttgtggcaaagagcttgacccaggaaatagatggtgccccccaaattgtctccacatgaagatgtactgatgacgccccagaaatgctgcttccatatcagctgctgctagcgccagcgcagactctcagggagtcaccacagcttgtcttgtgcttggtgagtgagggtctctctactcagtgtcagacatctacaggaaagaaacaactggtggaaaagagcaataaattgcccggtgctctgcagggctggaatttcaaacagaaagagggaataagatcctgtgatttttctcacctgcttttccacgcactgtggtcatcactgtgcaatctacatctagtatgaaatccacacataggagagctggggcacaaggggactggaggcagttgctttgcaagatggctgaggagaaagcacactgggaacacaatccagaatgttctaacaataagttttcagtgaataaaccactggcaagacaattccatgtgcacctttaggttacctatatagtctcctaggaagatcaggatgaaagacctagatgatacccctgaggataaaacctccatcccctaaaatgattttttttaaataccactgtctttagctgtccaggaggtcagagtgttttttctgtctttgggccaagtcctgtctgagacctgtattttcactcttgttaccaaatctatctccctagtgcagtgtctccaggcctgagtttcttctggaacagattccattttagaatggggattcacaggttctgtgcatcaccacagtgctcagagaggattctcctggggtgtcttagaggcaggtgcccaactcaaatgtattcccaaggtttgctgggctctgggatccacgagacaaccagagagggatatctcatgaaatttgcatctggtggctgaacagtacctatgttctctgttttgaatatactttaatacctgagagtcttaaaatttgtgaacaacgtttctatagtcctttattttcaaatgcacattgatcttcacttgctgcatttttactcttcaaccctgaaactatggtctacattaatatggatttttaaatcacatgtcattacttttgcaacaccatcaccaaaattttttgctcttttacatttaggttcatctctgtggtctgtgttgtcctgacatgtaaaaagcatatcgtttattgaggtttttttcccccccttttagagcatccggaagtgataacacgcaaaatcacaaagtagcataaatcagtaaattagttgagttgtttttgggggggaggtgggggtagggggcacagaacaccagaaagagtgttggtgtgtaggtagattccatattaatgaggaacactgaactagttggaaattactgctttctctagaaatataaagcaaagcactattccaaggctatggagtagctctacagcctggcctcaactctaaaagtgtgaagaatgcaatgggcagagacctacctgcagtggactgtcattttcctttctttctctgaattactgctttttctgtgggcattaactatattgctacagcatctagtgtactgagcctgcggtgcatggctcaggccttttcccatcgacgtctagggggactctggaccgtgtgaagctagggggtgtttctcagcacactgcagaagggcagctcagaagaatgcagggcccattcagcatggggatcccagcacatcactgtagaatttgagtgatctatgctgaataaacagtggaatgtgaccagtcaagtagaaatcttgagtaatcagatggaatgcaatctttctaacattaagctaccaagatcctgaatgtcagagatgtactcagagggttaacagacaagcacaaggcatgctgactacattggtgtatccagattgctttgcttttagccagtgctttctaatttttttctcgacattcttgggatagttcaagtttgaaataattaagtggtggtgttctttaaggaatttctataaccaaattgatcttatttttgatttcacttatcatagaacaaatatgtatcattatggcagtgtatctatgtaattatcaatttaatcatcaccaccggtgtttccatattttttcccaagtatttaatatagctctcttatggtggtggcctggtgatggggaccgtctttcttttactgacacatgaccaatcatatggtattttcaagggaattttaagattcatcttttcagtttgatagtagactagttaaggaagaactctttcattacttgcatcgtgtaaatcatctctgtagacatgtgttcatattaatgaacacattttttctcaacattgtagcagaaatcattttattcgtcatgatcaatgaatatgtgatttgctccagatcgttagaaggaaaagtaagatttcagtcatcaaaaatgtttttaccgtagccctcatctaacttacacgtggtgcatattaaaataagcagagaaaaaaaaatgtgaataaactactgaaaacacttggtgttttgtgttcaatgagaccttcctgcaacctgctccccatgggtggcagttaacaggcccatcagatattgttgaaagaaagcaatatatccatgaatgaaggctaaaattgcaatcctttaccctttgaggcatatttcagttgaaaacaaaaagaaaagaaaatttggcttagagggtcacagagctcccatatgaccaagtctcaagcacattaaatcatggttgtttactggccaagggcgtccactagacaactctatcccttgcgctgaagctcaatcgtgctgagggagagctttcttaatattactgtgttgctcttagcccttctctgggttaggatctgtcagcatttctatgataaactcctattctcaaaggtttttaatttgaccataaaaatgtgccccaggctgaagtttgctatacagggctgtaccaaagagtgaaggtttacttccttctctttccaacttcttccccattctccaaggaaaagaacaacaaaaaaatctggtatggtccctccttaatagtgatttcagaattttggaaagcaccaagatccaagatggtagttttaatgtagttactcattcgcacacattttttaaatttaatgggtcacctggcatatattgtagataacatatcttttctataatttgtaagtcaataatttttttaactgctacatgatatttttttttgcccaaagattttaaaagacttgaagttggtcagttcaaaactcagatttttctacacattgtctgccatgtccattaggagtttggggaaaatactctcacacagacccttactttgcatgcagtttagagggtaagatacgtgcttcttttggggataaagatttccttacttaattgtcaaatttcatggagccattctagtctgttggggaaaatagtgattaaaagcacttccaaaattaacattttttgacaattcagatatgaaaagaagcaggggaaaataatacactttactcttttcttgcttaaaggcaaacaaatcaatgaaacttgaggacacactaaacatttgataactgcaaatgtgctttaaaaattggttcaatggtgcttacacatgaaacggtaacaaatggggttcctaggacgtcagaaggaatctttagtttgtatgtaattacacactagaggaggaggtgcttttaagccagtcttttatttttaatcatctcaaatatgcaaccatacatgcagtaacattaagggtcgtaaactggtgggaaacaggaacttcagtggagaggcttaaatgcctctggttagagtgggggtttttgtttgtttgtttattgttgggtttcaacactgagcatcatttctgtgatcaagtttctaactggcatgtgttttgatcatgaggtttaccatatcttgcccatacagacaaatgagagatctagtttcattttgttccctaaagaaagaacactctctaaaattaaatcatacctgtaaatttcttcagcatttgtttctgttcaatgaaattgagacccttaatgttgctttaatgtaaaattgaatattttgtctgtgatatactttaataatttaaagtaagtaatagttctaaagtcttcactgttgctactaagagaaaatagaattttaaaggtgatgataaagatgctataatgtcagttcactccagtccaatcaaatgtagtaagaaaaagtccttgaatagttctctagggacaatttctcacttgccattgacattaatctttggtgtattctcagaaaaaataaaaagaaattgaaactggtccaaggttatagtcatatcctcgataacttttgaaaaaaaattttattaggaaattaatactagcctttttcattctggctgaaagaaaattattaaaggattagttgagtgtgaaattcaacagtattttgctcatacatactaaaaaggtgcgtagggacttggcgcatttaaacaagtttctgaaaggtttcaatttgactcaagaaaaaaattcaatatttcttttgaaaatactgaatttatcacttgctgcatggatcagatggcataggttaatctttgattttcagaatcctaatgaaataactttcaaacaatttgtgtccttaattaaaggtggaatgagatccaatttttccccctaatccttcagtttaagctgatacatgtaggttaatgtggaatgaaatcatctgtgatatattatgttcatttatcaactgagcttttttgatgttgcctgtttttatgtaaaacatgttcttaaagttaataaaataatagtacttggtgta

SEQ ID NO: 7077 - DNA, 1603 bp, Homo sapiens
gggaggaggcagtgggagggcggagggcgggggccttcggggtgggcgcccagggtagggcaggtggccgcggcgtggaggcagggagaatgcgactctccaaaaccctcgtcgacatggacatggccgactacagtgctgcactggacccagcctacaccaccctggaatttgagaatgtgcaggtgttgacgatgggcaatgacacgtccccatcagaaggcaccaacctcaacgcgcccaacagcctgggtgtcagcgccctgtgtgccatctgcggggaccgggccacgggcaaacactacggtgcctcgagctgtgacggctgcaagggcttcttccggaggagcgtgcggaagaaccacatgtactcctgcagatttagccggcagtgcgtggtggacaaagacaagaggaaccagtgccgctactgcaggctcaagaaatgcttccgggctggcatgaagaaggaagccgtccagaatgagcgggaccggatcagcactcgaaggtcaagctatgaggacagcagcctgccctccatcaatgcgctcctgcaggcggaggtcctgtcccgacagatcacctcccccgtctccgggatcaacggcgacattcgggcgaagaagattgccagcatcgcagatgtgtgtgagtccatgaaggagcagctgctggttctcgttgagtgggccaagtacatcccagctttctgcgagctccccctggacgaccaggtggccctgctcagagcccatgctggcgagcacctgctgctcggagccaccaagagatccatggtgttcaaggacgtgctgctcctaggcaatgactacattgtccctcggcactgcccggagctggcggagatgagccgggtgtccatacgcatccttgacgagctggtgctgcccttccaggagctgcagatcgatgacaatgagtatgcctacctcaaagccatcatcttctttgacccagatgccaaggggctgagcgatccagggaagatcaagcggctgcgttcccaggtgcaggtgagcttggaggactacatcaacgaccgccagtatgactcgcgtggccgctttggagagctgctgctgctgctgcccaccttgcagagcatcacctggcagatgatcgagcagatccagttcatcaagctcttcggcatggccaagattgacaacctgttgcaggagatgctgctgggaggtccgtgccaagcccaggaggggcggggttggagtggggactccccaggagacaggcctcacacagtgagctcacccctcagctccttggcttccccactgtgccgctttgggcaagttgcttaacctgtctgtgcctcagtttcctcaccagaaaaatgggaacaaggcaatggtctatttgttcaggcaccgagaacctagcacgtgccagtcactgttctaagtgctggcaattcagcaaagaacaagatctttgccctcggggaggctgtgtgtgtgtgagtatgtatggatgcgtggatatctgtgtatatgcccgtatgtgcgtgcatgtgtatataaagcctcacattttatgattttgaaataaacaggtaatatga

SEQ ID NO: 7078 - DNA, 2880 bp, Homo sapiens
atggagactgcgagcgagcagaactccaattccaccaatgggagttctagctcagggggcagctctcggccccagatagctcaaatgtcactatatgaacgagaagcagtgcaggccacaattgctgccagtcggcaggccagctccccaaacaccagcactacacagcagcagactaccaccacccaggcctcgatcaatctggccaccacatcggccgcccagctcatcagccgatcccagagtgtgagctctcccagtgctaccaccttgacccaatctgtgctactggggaacaccacctccccacccctcaaccagtctcaggcccagatgtatctacgggtaaaccgaaccctgggtcggaatgtgcctctagcctcccaactcatcctgatgcctaatggggcagtggctgcagtccagcaggaggtgccatctgctcagtctcctggagttcatgcagatgcagatcaggttcagaacttggcagtaaggaatcaacaggcctcagctcaaggacctcagatgcaaggctccactcagaaggccattcctccaggagcctcccctgtctctagcctctcccaggcctctagccaggccctagcggtggcacaggcttcctctggggccacaaaccagtccctcaaccttagtcaagctggtggaggcagtgggaatagcatcccagggtccatgggtccaggtggaggtgggcaggcacatggtggtttgggtcagttgccttcctcaggaatgggtggtgggagctgtcccaggaagggtacaggagtggtgcagcccttgcctgcagcccaaacagtgactgtgagccagggcagccagacagaggcagaaagtgcagcagccaagaaggcagaagcagatgggagtggccagcagaatgtgggcatgaacctgacacggacagccacacctgcgcccagccagacacttattagctcagccacctacacacagatccagccccattcactgattcagcaacagcaacagatccacctccagcagaaacaggtggtgatccagcagcagattgccatccaccaccagcagcagttccagcactggcagtcccagctccttcacacagctacacacctccagttggcgcagcagcagcagcagcaacaacagcaacagcagcaacagcagcagccgcaagccaccaccctcactgcccctcagccaccacaggtcccacctactcagcaggtcccaccttcccagtcccagcagcaagcccaaaccctggtcgttcagcccatgcttcagtcttcacccttgtctcttccacctgatgcagcccctaagccaccaattcccatccaatccaaaccacctgtagcacctatcaagccgcctcagttaggggccgctaagatgtcagctgcccagcaaccaccaccccatatccctgtgcaagttgtaggcactcgacagccaggtacagcccaggcacaggctttggggttggcacagctggcagctgctgtacctacttcccgggggatgccaggtacagtgcagtctggtcaggcccatttggcctcctcgccaccttcatcccaggctcctggtgcactgcaggagtgccctcccacattggcccctgggatgacccttgctcctgtgcaggggacagcacatgtggtaaagggtggggctaccacctcctcacctgttgtagcccaggtccctgctgccttctatatgcagtctgtgcacttgccgggtaaaccccagacattggctgtcaaacgcaaggctgactctgaggaggagagagatgatgtctccacattgggttcaatgcttcctgccaaggcatctccagtagcagaaagcccaaaagtcatggacgagaagagcagtcttggagaaaaagctgaatcagtggctaatgtgaatgctaatactccaaacagtgaactagtagccttgacccccgccccttcagtaccgcctcctacactagccatggtgtctagacaaatgggtgactcaaaacccccacaggccatcgtgaagccccagattctcacccacatcattgaaggctttgttatccaggaaggagcagaacctttcccggtgggttgttctcagttactgaaggagtctgagaagccactacagactggccttccgacagggctgactgagaatcagtcaggtggccctttgggagtggacagcccatctgctgagttagataagaaggcgaatctcctgaagtgcgagtactgtgggaagtacgcccccgcagagcagtttcgtggctctaagaggttctgctccatgacttgcgctaagaggtacaatgtgagctgtagccatcagttccggctgaagaggaaaaaaatgaaagagtttcaagaagccaactatgctcgcgttcgcaggcgtggaccccgccgcagctcctctgacattgcccgtgccaagattcagggcaagtgccaccggggtcaagaagactctagccggggttcagataattccagttatgatgaagcactctctccaacatctcctgggcctttatcagtaagagctgggcatggagaacgtgacctggggaatcccaatacagctccacctacaccggaattacatggcatcaaccctgtgttcctgtccagtaatcccagccgttggagtgtagaggaggtgtacgagtttattgcttctctccaaggctgccaagagattgcagaggaatttcgctcacaggagattgatggacaggcccttttattacttaaagaagaacatcttatgagtgccatgaacatcaagctgggccctgccctcaagatctgcgccaagataaatgtcctcaaggagacctaa

SEQ ID NO: 7079 - DNA, 414 bp, Homo sapiens
atgaactttctgctgtcttgggtgcattggagccttgccttgctgctctacctccaccatgccaagtggtcccaggctgcacccatggcagaaggaggagggcagaatcatcacgaagtggtgaagttcatggatgtctatcagcgcagctactgccatccaatcgagaccctggtggacatcttccaggagtaccctgatgagatcgagtacatcttcaagccatcctgtgtgcccctgatgcgatgcgggggctgctgcaatgacgagggcctggagtgtgtgcccactgaggagtccaacatcaccatgcagattatgcggatcaaacctcaccaaggccagcacataggagagatgagcttcctacagcacaacaaatgtgaatgcagatgtgacaagccgaggcggtga

SEQ ID NO: 7080 - DNA, 481 bp, Homo sapiens
attgagaaagaagaggattggaaggccgggcgtataaagccgcgcagagagcgtgaaacaaagcagtcggctcggaattggacttgggaggcgcgagaaaattcctgttccaagagaaaataaggcaacatcaatgaaggagagaagagccagccagaaattatccagcaaatctatcatggatcctaatcagaacgtgaaatgcaagatagttgtggtgggagacagtcagtgtggaaaaactgcgctgctccatgtcttcgccaaggactgcttccccgagaattacgttcctacagtgtttgagaattacacggccagttttgaaatcgacacacaaagaatagagttgagcctgtgggacacttcgggttctccttactatgacaatgtccgccccctctcttaccctgattcggatgctgtgctgatttgctttgacatcagtagaccagagaccctggacagtgtcctcaaaaag

SEQ ID NO: 7081 - DNA, 4767 bp, Homo sapiens; identical to SEQ ID NO: 4945

SEQ ID NO: 7082 - DNA, 1066 bp, Homo sapiens
gaccaacagttggggatacagactaaagatgtggcagtggatgggcagaactggacgtttgcttttgacttctccttcctgagccaacaagaggatctggcatgggctgagctccggctgcagctgtccagccctgtggacctccccactgagggctcacttgccattgagattttccaccagccaaagcccgacacagagcaggcttcagacagctgcttagagcggtttcagatggacctattcactgtcactttgtcccaggtcaccttttccttgggcagcatggttttggaggtgaccaggcctctctccaagtggctgaagcaccctggggccctggagaagcagatgtccagggtagctggagagtgctggccgcggccccccacaccgcctgccaccaatgtgctccttatgctctactccaacctctcgcaggagcagaggcagctgggtgggtccaccttgctgtgggaagccgagagctcctggcgggcccaggagggacagctgtcctgggagtggggcaagaggcaccgtcgacatcacttgccagacagaagtcaactgtgtcggaaggtcaagttccaggtggacttcaacctgatcggatggggctcctggatcatctaccccaagcagtacaacgcctatcgctgtgagggcgagtgtcctaatcctgttggggaggagtttcatccgaccaaccatgcatacatccagagtctgctgaaacgttaccagccccaccgagtcccttccacttgttgtgccccagtgaagaccaagccgctgagcatgctgtatgtggataatggcagagtgctcctagatcaccataaagacatgatcgtggaagaatgtgggtgcctctgatgacatcctggagggagactggatttgcctgcactctggaaggctgggaaactcctggaagacatgataaccatctaatccagtaaggagaaacagagaggggcaaagttgctctgcccaccagaactgaagaggaggggctgcccactctgtaaatgaagggctcagtggagtctggccaagcaca

SEQ ID NO: 7083 - DNA, 1173 bp, Homo sapiens
ccggggccgcgcggctgcctgggaggctccgggccagccgcggtccagagcgcgcgaggttcggggagctcggccaggctgctggtacctgcgtccgcccggcggacaggctgctttggtttgtgacctccaggcaggacggccatcctctccagaatgaagatcttcttgccagtgctgctggctgcccttctgggtgtggagcgagccagctcgctgatgtgcttctcctgcttgaaccagaagagcaatctgtactgcctgaagccgaccatctgctccgaccaggacaactactgcgtgactgtgtctgctagtgccggcattgggaatctcgtgacatttggccacagcctgagcaagacctgttccccggcctgccccatcccagaaggcgtcaatgttggtgtggcttccatgggcatcagctgctgccagagctttctgtgcaatttcagtgcggccgatggcgggctgcgggcaagcgtcaccctgctgggtgccgggctgctgctgagcctgctgccggccctgctgcggtttggcccctgaccgcccagaccctgtcccccgatcccccagctcaggaaggaaagcccagccctttctggatcccacagtgtatgggagcccctgactcctcacgtgcctgatctgtgcccttggtcccaggtcaggcccaccccctgcacctccacctgccccagcccctgcctctgccccaagtggggccagctgccctcacttctggggtggatgatgtgaccttccttgggggaccgcggaagggacgagggttccctggagtcttacggtccaacatcaggaccaagtcccatggacatgctgacagggtccccagggagaccgtgtcagtagggatgtgtgcctggctgtgtacgtgggtgtgcagtgcacgtgagagcacgtggcggcttctgggggccatgtttggggagggaggtgtgccagcagcctggagagcctcagtccctgtagccccctgccctggcacagctgcatgcacttcaagggcagcctttgggggttggggtttctgccacttccgggtctaggccctgccccaaatccagccagtcctgccccagcccacccccacattggagccctcctgctgctttggtgcctcaaataaatacagatgtcccccag

SEQ ID NO: 7084 - DNA, 1705 bp, Homo sapiens
agcctccaatccgacccccatttcggctgcagcctcggacctagctccggccctcggtctatccggttgcatcctccctccctgttccggatcttatcttgcgccagcgcctactccaggatcccgtagccagacctcaagccatggctggtcccttctcccgtctgctgtccgcccgcccgggactcaggctcctggctttggccggagcggggtctctagccgctgggttctgctccgaccggaacctgtacgagctgccagtgaacgacggaggctgtatcccccgagagcaaagccagacatggccaactggacagctcccaggtaactgcactaggtctaggcgtctgtgccctccctccatggttactgggtaccccctccccagcgctgagtacccagacctccgaaagcacaacaactgcatggccagtcacctgaccccagcagtctatgcacggctctgcgacaagaccacacccactggttggacgctagatcagtgtatccagactggcgtggacaaccctggccaccccttcatcaagactgtgggcatggtggctggagatgaggagacctatgaggtatttgctgacctgtttgaccctgtgatccaagagcgacacaatggatatgacccccggacaatgaagcacaccacggatctagatgccagtaaaatccgttctggctactttgatgagaggtatgtattgtcctctagagtcagaactggccgaagcatccgaggactcagtctgcctccagcttgcactcgagcagagcgacgagaggtggaacgtgttgtggtggatgcactgagtggcctgaagggtgacctggctggacgttactataggctcagtgagatgacagaggctgaacagcagcagcttattgatgaccactttctgtttgataagcctgtgtccccgttgctgactgcagcaggaatggctcgagactggccagatgctcgtggaatttggcacaacaatgagaagagcttcctgatctgggtgaatgaggaggatcatacacgggtgatctccatggagaagggtggtaacatgaagagagtgtttgaaagattctgccgaggcctcaaagaggttagagaagactatgtaggggagctaggtgggaggacataaggaaaaccaaagagtagcataaatagattatgtaatttaccaaccaacccaggacatgtcttatagtaaaaaggactatctaggactcactccaggactaaaggtgtaaaccagctgggaccatactgggaaaaccaggacatgtggtcacactaagattaggaaaagaaagagtgtcaggaatcttaggaagtgaacaaggctgttgacagagagtgcaaagaaggaataaatgagatggcacgtcagtgcctgggatgtgtgcagtgggatggtgaggtgtgcagataaggaaaacattcgagcttagattgatgttggcggggagaggttgctgtgttcatgactctaatataaccacccagttctgagacaaggtaggccttgactctggattctatcattcttgttaaagtatcgggtctaggctttaagttgagagttcggagagagactggggaaggtggaggatagaatggttcaagttctagaatatgtggctctagatgagaggttgaactgaatcatcaatcctacatggattg

SEQ ID NO: 7085 - DNA, 3369 bp, Homo sapiens
agtcgcccagagaagcgggagtgggagaagctttgagagttgcaggggactacttttttccggtcgggcggcgggcctcatgggtgcttgtttaccgggctgggagcagggcattcaaaagctgggtgtcggagcgcactgaagtccaacacgcctgcagagaccgccctaagcctggaggtgtgtctggcttgcatccagaaccacagggtggattctcgccaccgacttggctggatgacggctggctggtggtgagctcccctgcccactggctgacctcaagcagttggccccggtaggtggaggctattcgagggggacaagctggggacgcagcgtcagctcctgccagcgcgcgggtctcctccacctccaagcagtgtggtgcgtgggacgcgcatcttcccggactatccctttccagcgcggtctgtgcggaccccgagcccggcagccaccagggacggagggcggggtgcctttctctgggctcatccgctgtcagccgtgggaactcttaactttatccagagggatctgtgcaggcgggggtgggagaggttctcctcccctggcggttacctccccctcccgggccgcccctcccccgcctcccatggcttcgctttcagagcatcctcactccgcccagttcggtgccagctgcgtgggctccagcttcgatcgttttccttggaatgctccaaaactcagcagcgactaagggaattccattggaatttgccgggcgtgctctcaccccgcacggcacccgcgccgtcagtcctcggatcccatcacttcagcccgaagattgcaactttgcagagacgaagaaatagcatggcatgaaacatggctcagttctattacaaaagaaatgttaatgctccctatagagaccgcatccctctaaggatagtaagagcagaatcagaactctcgccatcagaaaaagcctacttgaatgctgtggaaaagggagattatgccagtgtcaagaaatccctagaggaagctgaaatttattttaaaatcaatattaattgcattgatcctctcggaagaactgctctcctcattgcaattgaaaatgagaacttggagctcatcgaactactcttaagctttaatgtctatgttggagatgctctattacatgctatcagaaaagaagtcgtcggagctgttgagctgttattgaaccacaaaaaacctagtggagaaaaacaggtgcctcctatactccttgataagcagttctctgaattcactccagacattacaccaatcattttggcagcccatacaaataattatgagataataaaactcttggttcagaaaggagtctcagtgcctcgaccccacgaggtccgctgtaactgtgtggaatgcgtgtccagttcagatgtggacagcctccgtcactcacgctccagactcaacatctacaaggccttggccagtccctctctcattgcactgtcaagcgaagatccttttctcacagcctttcagttaagttgggaacttcaggaactgagcaaggtggaaaatgaattcaagtcggagtatgaagagctgtcacggcagtgcaaacaatttgctaaggacctactggatcagacgagaagttccagagaactggaaatcattcttaattaccgagatgacaatagtctcatagaagaacaaagtggaaatgatcttgcaagactaaaattggccattaagtaccgtcaaaaagagtttgttgcccagcccaattgtcaacagctgctggcatctcgctggtacgatgagtttccaggctggaggagaagacactgggcagtgaagatggtgacatgtttcataataggacttctttttcctgtcttctctgtgtgctacctgatagctcccaaaagcccacttggactgttcatcaggaagccatttatcaagtttatctgccacacagcctcctatttgacttttttgttcctgctgctgcttgcctctcagcacatcgacaggtcagacttgaacaggcaaggtccaccaccaaccatcgtcgagtggatgatattaccgtgggtcctgggcttcatatggggagaaattaaacagatgtgggatggcggacttcaggactacatccatgattggtggaatctaatggactttgtaatgaactccttatatttagcaacaatctccttgaaaattgttgcatttgtaaagtacagtgcccttaatccacgagaatcatgggacatgtggcatcccactctggtggcagaggctttatttgctattgcaaacatcttcagttctctgcgtctgatctcactgtttactgcaaattctcacctgggacctctgcaaatatctctgggaagaatgctcctggacattttgaagtttctattcatatactgccttgtgttgctagcatttgcaaatggcctaaatcaattgtacttctattatgaagaaacgaaagggttaacctgcaaaggcataagatgtgaaaagcagaataatgcattttcaacgttatttgagacactgcagtccctgttttggtcaatatttgggctcatcaatttatatgtgaccaatgtcaaagcacagcatgaatttactgagtttgttggtgccaccatgtttgggacatacaatgtcatctctctggttgttctactcaacatgttaatagctatgatgaataattcttaccaactgattgctgaccatgcagatatagaatggaaatttgcacgaacaaagctttggatgagttattttgaagaaggaggtactctgcctactcccttcaatgtcatcccgagccccaagtctctctggtacctgatcaaatggatctggacacacttgtgcaagaaaaagatgagaagaaagccagaaagttttggaacaatagggaggcgagctgctgataacttgagaagacatcaccaataccaagaagttatgaggaacctggtgaagcgatacgttgctgcaatgattagagatgctaaaactgaagaagttgctcgtcaacaggctgcaggaccacttgagagaaatattcaactggaatctcgaggattagcttcacggggtgacctgagcattcccggtctcagtgaacaatgtgtgttagtagaccatagagaaaggaatacggacacactggggttacaggtaggaaagagagtgtgtccattcaagtcagagaaggtggtggtggaggacacggttcctataataccaaaggagaaacatgcaaaagaagaggactctagtatagactatgatctaaacctcccagacacagtcacccacgaagattacgtgaccacaagattgtga

SEQ ID NO: 7086 - DNA, 549 bp, Homo sapiens
catttaaaggtgtgcggcgggtctctgttcacatggctcaactggaaacctgtttcatgaacaagcttactcaggaaccatctggtggtattccagcacattgttcttcagggggacgactctaagtcgctttgtggtggcagcagcttagaatcagtatttgtggttgggaaagatggacttacgggagcttggtaatgcaggtggtgaaggagcaggttatgagagcacttacaaccaagcctagctccctggaccagttcaagagcaaactgcagaacctgagctacactgagatcctgaaaatccgccagtccgagaggatgaaccaggaagatttccagtcccgcccgattttacaagttttggtattgtcggctttcgccaaatcacaaagtcctgcattacggagacttagaagagagtcctcagggagaagtgccccacgattccttgcaggacaaactgccggtggcagatatcaaagccgtggtgacgggaaaggactgccctcatatgaaagagaaaggtgcccttaaacaaaacaag

SEQ ID NO: 7087 - DNA, 774 bp, Homo sapiens
gccagcgaagccctagaggcggtctccaaagagcacgtctctctgctatcttggtctggcgggaggccttgagaggcgactggcaaggagagagaactcctgggtcccatttagccaggaagtagcaccagaggacccccacattcccgcctcccagcttcctgaggggatcagctataccctggactctggggcccactccagagagcgtgggccagcccgaggaggcaagcccggaggagcagccagaggaggcgagtgctgaggaggagcggccggaggaccagcaggaggaggaggcggcggccgccgccgcgtacctggacgagctgcccgagccgctgctgctgcgcgtgctggccgcactgccggccgccgagctggtgcaggcctgccgcctggtgtgcctgcgctggaaggagctggtggacggcgccccgctgtggctgctcaagtgccagcaggaggggctggtgcccgagggcggcgtggaggaggagcgcgaccactggcagcagttctacttcctgagcaagcggcgccgcaaccttctgcgtaacccgtgtggggaagaggacttggaaggctggtgtgacgtggagcatggtggggacggctggagggtggaggagctgcctggagacagtggggtggagttcacccacgatgagagcgtcaagaagtacttcgcctcctcctttgagtaaggagaagggggtggaggaggtgggaaggggggagcgttcgctctgtcctaactccagttctcccagg

SEQ ID NO: 7088 - DNA, 1244 bp, Homo sapiens
tttccaagaaactaaagagtgtattccgagtaccagatctgagtgggatgctgcaagttcttaaagagctgacagatgtccagtactactgggtagaaaacttctgccacgcctaggatcccagactgtgagtctgtgttcataagcaaggttctctaagattcaactataaaaaaacttactaaggtatgtcttcattatatgacttctcatatggagaaattcagccataatcactaacttccttttaagctactcttttgcaacctcctcagaagtgcatacaaaatagaacatgaaagaaaactatccccaaatcctcaatataatttatttctggaaacctttacaagtccatgatatcaaaattttgaaaggctatgtaagacgttaatggacatctatatcaacttgaaatgatgtagctataaatttcatctcccataattcttcatttaaaaaatctagttattattagttaataaacctctgcatcaagtcaagtaacactgagataaatatgaagaaaacaagcacatccatttaatctatataatttctaaagagatgaagaaaggcttagaaaaatactacaattttatttctgtggtggttccaacctgtgataactgagaacaatacaaatagagatttgaaattcatgttgaatcatgaatcatatgtctgcatctctcaaaatctccaatagctccaaattccaggtctctgagttcatcctgctgggattcccgggcattcacagctggcaacactggctatctctgcccctggcactactgtatctctcagcacttgctgcaaacaccctcatcctcatcatcatctggcagaacccttctttacagcagcccatgtatattttccttggcatcctctgtatggtagacatgggtctggccactactatcatccctaagatcctggccatcttctggtttgatgccaaggttattagcctccctgagtgctttgctcagatttatgccattcacttctttgtgggcatggagtctggtatcctactctgcatggcttttgatagatatgtggctatttgtcaccctcttcgctatccatcaattgtcaccagttccttaatcttaaaagctaccctgttcatggtgctgagaaatggcttatttgtcactccagtgcctgtgcttgcagcacagcgtgattattgctccaagaatgaaattgaacactgcctgtgctctaacctt

SEQ ID NO: 7089 - DNA, 1135 bp, Homo sapiens
aggggtgaaaggacagccagggttagatgttctgaggaggcgggagcaaccgagagagcacgtgagcatctgtcctttctacccgttcctctttatctttagtgttcagtagcagcggggatagcccggggcccggtgtatggccacggagttacagtgtccggactccatgccctgtcacaaccagcaagtaaactctgcctcaaccccaagtcccgagcagctgcgacctggcgatctgatcctggaccacgcagggggaaacagagcctccagggccaaggtgattctcctcacggggtacgcccattctagcctgccggccgagctggactctggggcctgcggcggctccagcctcaactcagagggcaacagtggtagtggtgacagtagcagctatgacgcaccagctggcaactccttcctagaggactgcgaactctcccggcagatcggggcgcagcttaagctgctgcctatgaatgatcagatacgggagctacagaccatcatccgtgacaagacagccagtagaggtgacttcatgttttctgcggatcgtttggttttgcctgaggatttattccaaaagagcatagacaactcctgttctgcttttcatcatcagacttgttgtggaagagggattgaatcagctgccatataaagaatgcatggtgaccactccaacagggtacaagtatgaaggagtgaaatttgagaagggaaattgtggggtcagcataatgagaagcggtgaggcaatggaacaaggtttacgagactgctgtcgatccatacgaattggaaagatcctgattcagagtgatgaggagacacaaagagccaaagtatattatgccaaattccccccagacatttaccggagaaaagtccttctgatgtatccaattctcagcactggaaatactgtaattgaagctgtaaaggttcttatagaacatggagttcaacccagtgttatcatcctactcagtctgttctccactcctcatggtgccaaatcaatcattcaggagtttccagagatcacaattttaactactgaagttcatcctgttgcacctacacattttggacagaaatactttggaacagactaagttattta

SEQ ID NO: 7090 - DNA, 578 bp, Homo sapiens
agatcataagcctaaactctgcaggctggctaaaggtgaaaatggctatggctttcacttaaatgcgattcggggtctgccaggctcattcatcaaagaggtacagaagggcggtcctgctgacttggctgggctagaggatgaggatgtcatcattgaagtgaatggggtgaatgtgctagatgaaccctatgagaaggtggtggatagaatccagagcagtgggaagaatgtcacacttctagtctgtggaaagaaggcctatgattatttccaagctaagaaaatccctattgtttcctccctggctgatccacttgacacccctccagattctaaagaaggaatagtggtggagtcaaaccatgactcgcacatggcaaaagaacgggcggctattgcagacggctaatttatgcttaacttaggaagagataaggttccttgagcaccaaagatgattcataactctgtataggtgacagctgcttataaaagcatcttagcagataagcctattaaaattgtgcttttgtaacaatgttgtggttgctagaataaataccattaacaaatgc

SEQ ID NO: 7091 - DNA, 2822 bp, Homo sapiens
ggcgacggcagcgcctcctccgccaccaaactcctggggctccgcgggggcttggggccacctcctcctgagcccggaggaaccctctcccgataggttccagcgtgactccctcccactccacccttttcctttcttcttcctcttttttttttttttttttaaacacatttttttcctggcttcggacctcagactgctgcagccctaaccttcccagggctcagctctttggagctgcccattcctccggctgcgagaaaggacgcgcgccctgcgtcgggcgaagaaaagaagcaaaacttgtcgggagggtttcgtcatcaacctccttcccgcaaacctaaacctcctgccggggccatccctagacagaggaaagttcctgcagagccgaccagccctagtggatctggggcaggcagcggcgctggctgtggaattagatctgttttgaacccagtggagcgcatcgctggggctcggaagtcaccgtccgcgggcaccgggttggcgctgcccgagtggaaccgacagtttgcgagcctcggctgcaagtggcctctcctccccgcggttgttgttcagtgtcgggtgagggctgcgagtgtggcaagttgcaaagagagcctcagaggtccgaagagcgctgcgctcctactcgcgttcgcttcttcctcttctcggttccctactgtgaaatcgcagcgacatttacaaaggcctccgggtcctaccgagaccgatccgcagcgtttggcccggtcgtgcctattgcatcgggagcccccgagcaccggcgaaggactggcgggtggggtagggaggtggcggcggcggcatggcgaggttcccgaaggccgacctggccgctgcaggagttatgttactttgccacttcttcacggaccagtttcagttcgccgatgggaaacccggagaccaaatccttgattggcagtatggagttactcaggccttccctcacacagaggaggaggtggaagttgattcacacgcgtacagccacaggtggaaaagaaacttggactttctcaaggcggtagacacgaaccgagcaagcgtcggccaagactctcctgagcccagaagcttcacagacctgctgctggatgatgggcaggacaataacactcagatcgagagagtgaatctgtccttcgattttccattttatggccacttcctacgtgaaatcactgtggcaaccgggggtttcatatacactggagaagtcgtacatcgaatgctaacagccacacagtacatagcacctttaatggcaaatttcgatcccagtgtatccagaaattcaactgtcagatattttgataatggcacagcacttgtggtccagtgggaccatgtacatctccaggataattataacctgggaagcttcacattccaggcaaccctgctcatggatggacgaatcatctttggatacaaagaaattcctgtcttggtcacacagataagttcaaccaatcatccagtgaaagtcggactgtccgatgcatttgtcgttgtccacaggatccaacaaattcccaatgttcgaagaagaacaatttatgaataccaccgagtagagctacaaatgtcaaaaattaccaacatttcggctgtggagatgaccccattacccacatgcctccagtttaacagatgtggcccctgtgtatcttctcagattggcttcaactgcagttggtgtagtaaacttcaaagatgttccagtggatttgatcgtcatcggcaggactgggtggacagtggatgccctgaagagtcaaaagagaagatgtgtgagaatacagaaccagtggaaacttcttctcgaaccaccacaaccgtaggagcgacaaccacccagttcagggtcctaactaccaccagaagagcagtgacttctcagtttcccaccagcctccctacagaagatgataccaagatagcactacatctaaaagataatggagcttctacagatgacagtgcagctgagaagaaagggggaaccctccacgctggcctcatcattggaatcctcatcctggtcctcattgtagccacagccattcttgtgacagtctatatgtatcaccacccaacatcagcagccagcatcttctttattgagagacgcccaagcagatggcctgcgatgaagtttagaagaggctctggacatcctgcctatgctgaagttgaaccagttggagagaaagaaggctttattgtatcagagcagtgctaaaatttctaggacagaacaacaccagtactggtttacaggtgttaagactaaaattttgcctatacctttaagacaaacaaacaaacacacacacaaacaagctctaagctgctgtagcctgaagaagacaagatttctggacaagctcagcccaggaaacaaagggtaaacaaaaaactaaaacttatacaagataccatttacactgaacatagaattccctagtggaatgtcatctatagttcactcggaacatctcccgtggacttatctgaagtatgacaagattataatgcttttggcttaggtgcagggttgcaaagggatcagaaaaaaaaaatcataataaagctttagttcatgagggatcgacacctttggttcaaatgttctctgatgtctcaaagataactgttttccaaagcctgaaccctttcactcaaaagagcaatgatgaatgtctcaagattgctaagaaaaacagcccatgcaagagtgagaacaaacacaaaataagagattttctacattttcaaaa

SEQ ID NO: 7092 - DNA, 982 bp, Homo sapiens
tcttatcttgcgccagcgcctactccaggatcccgtagccagacctcaagccatggctggtcccttctcccgtctgctgtccgcccgcccgggactcaggctcctggctttggccggagcggggtctctagccgctgggtttctgctccgaccggaacctgtacgagctgccagtgaacgacggaggctgtatcccccgagcgctgagtacccagacctccgaaagcacaacaactgcatggccagtcacctgaccccagcagtctatgcacggctctgcgacaagaccacacccactggttggacgctagatcagtgtatccagactggcgtggacaaccctggccaccccttcatcaagactgtgggcatggtggctggagatgaggagacctatgaggtatttgctgacctgtttgaccctgtgatccgaggactcagtctgcctccagcttgcactcgagcagagcgacgagaggtggaacgtgttgtggtggatgcactgagtggcctgaagggtgacctggctggacgttactataggctcagtgagatgacagaggctgaacagcagcagcttattgatgaccactttctgtttgataagcctgtgtccccgttgctgactgcagcaggaatggctcgagactggccagatgctcgtggaatttggcacaacaatgagaagagcttcctgatctgggtgaatgaggaggatcatacacgggtgatctccatggagaagggtggtaacatgaagagagtgtttgaaagattctgccgaggcctcaaagaggttgttgtggggattaagtgaaatacaggtaaagtacttggtccacagtaagtgcttaataagtgttaaagtgttagctgcaatattattctggatggaagagtttccccccatgttcagcacataagatatccctggtggcatggttccttctgaactacaaacaggatccctttactcatgttg

SEQ ID NO: 7093 - DNA, 830 bp, Homo sapiens
cacccagaaggaaagagcccatactttcaatcttaggcataagttagcttgataagattttcagaaaaattcccttttaaccacagaactcccccactggaaaggattctgaaagaaatgaagtcagccctcagaaatgaagttgactgcctgctggctttctgttgactggcccggagctgtactgcaagacccttgtgagcttccctagtctaagagtaggatgtctgctgaagtcatccatcaggttgaagaagcacttgatacagatgagaaggagatgctgctctttttgtgccgggatgttgctatagatgtggttccacctaatgtcagggaccttctggatattttacgggaaagaggtaagctgtctgtcggggacttggctgaactgctctacagagtgaggcgatttgacctgctcaaacgtatcttgaagatggacagaaaagctgtggagacccacctgctcaggaaccctcaccttgtttcggactatagagtgctgatggcagagattggtgaggatttggataaatctgatgtgtcctcattaattttcctcatgaaggattacatgggccgaggcaagataagcaaggagaagagtttcttggaccttgtggttgagttggagaaactaaatctggttgccccagatcaactggatttattagaaaaatgcctaaagaacatccacagaatagacctgaagacaaaaatccagaagtacaagcagtctggtggatggaatggaacctggatgaccaaagcctcctttagcttgtggctagaaatcgcgtccctttatattcttcatatcccag

SEQ ID NO: 7094 - DNA, 1279 bp, Homo sapiens
tgttaaagatgcaaagggttgaacatgctgtgtctgaattcatcaaatatgagatctccttcaatgtatatatgttccatggtggaaccaactttggtttcatgaacggggccacatatttcgggaagcactcgggcattgtcaccagctatgactatgatgcagtgctcacggaggctggagattacacagaaaaatatctgaagcttcaaaaactctttcaatctgtctcagcaactcccctgccccgagtacccaaacttcctcccaaggctgtgtatccccccgtgagaccgtcgctgtacctcccgctgtgggacgccctatcctacttaaatgagccagtcaggtcgcgtcagcccgtcaacatggagaaccttcccataaacaatgggagcggccagtcctacgggcttgtcctgtatgagaagtccatctgctccggaggccgcctccgtgcccacgctcatgacgtggcacaggtgtttttggatgagacaatgatagggattctgaatgagaataataaggacctgcacattcctgaactcagggaataactggatctgtcagcatcaataactcttccctggagggctttaccatctattccctggagatgaaaatgagcttctttgagaggctccgctctgccacctggaagcctgtcccagacagccaccagggcccggccttctactgtgggaccttgaaggctggcccttctcccaaggacaccttcctgagcctgctgaactggaattatggatttgtgttcatcaatggacgtaaccttgggcgatattggaatattgggcctcagaaaacactgtaccttcctggagtttggcttcatccagaagacaatgaggtcatcttgtttgagaagatgatgagtggctcagatatcaaatctacagacaagcccacgctgtaaaactgtgtctgaacatttttttttttttttgagatggagtctcactttgtcgcccaggctggagtgcagtggcacaatctctgctcactgcaagctcagcctctcgggttcacgccattctcctgcctcagcctccccagcagctgggactacaggtgcacgccaccacgcctggctaattttttgtatttttagtagagatggggtttcaccaagttagccaggatggtcccaatctcctgaccttgtgatctgctctcctcagcctcccaaagtactgggattacaggcgtgagccaccactcccggccgtgaacatattttttgggttgctggagttca

SEQ ID NO: 7095 - DNA, 730 bp, Homo sapiens
tcctttccccaagaccttgtgggggaacccgccgccagcgcggagccaccgtgactcgtagcctgacttccgtttccgggggcggcttccggcggcgtgacctgaccgcaagaggccaatggagtgtgggagctgaaagggtcttcgctggcggccggtaactggcggcggttgggaacggccgagtgtggctcttctggtgtttcagcttggggagagaggggtggccttcctcttgcagttgaggccggcgccgagccggacttcaggcggatctcgtggcggagcccatcttgctccctctcccaggcctttacccgctccctaggattcccgggccctgtaggtgggagttgggagacgtgagttctctttcattctgcgcctctcattggctctctgaccttgtgcggaacgcgtcctttagctgacctcagctgcattttttagaagatggagattgtattcacagtgactgtcagctttttaacggcgggaactgacgtagtgttaaacactgtcgtgtatcgctggcacagcacaaggacattataggacagtactgcttttaaagagacagtgttagggatcttggaagcacagccaacatgtgtgacattgaagaagccactaaccaactcctagatgtgaaccttcatgagaaccagaagtctgtacaagtgacagaaagtgacctcggaagtgaatctgagcttctagtcactattgg

SEQ ID NO: 7096 - DNA, 1825 bp, Homo sapiens
ggacaagttttggtggcacgcagcctggggactctgcctcgtgccgctgagcctggcgcagatcgatttgaatataacctgccgctttgcaggtgtattccacgtggagaaaaatggtcgctacagcatctctcggacggaggccgctgacctctgcaaggctttcaatagcaccttgcccacaatggcccagatggagaaagctctgagcatcggatttgagacctgcaggtatgggttcatagaagggcacgtggtgattccccggatccaccccaactccatctgtgcagcaaacaacacaggggtgtacatcctcacatccaacacctcccagtatgacacatattgcttcaatgcttcagctccacctgaagaagattgtacatcagtcacagacctgcccaatgcctttgatggaccaattaccataactattgttaaccgtgatggcacccgctatgtccagaaaggagaatacagaacgaatcctgaagacatctaccccagcaaccctactgatgatgacgtgagcagcggctcctccagtgaaaggagcagcacttcaggaggttacatcttttacaccttttctactgtacaccccatcccagacgaagacagtccctggatcaccgacagcacagacagaatccctgctaccagagaccaagacacattccaccccagtggggggtcccataccactcatggatctgaatcagatggacactcacatgggagtcaagaaggtggagcaaacacaacctctggtcctataaggacaccccaaattccagaatggctgatcatcttggcatccctcttggccttggctttgattcttgcagtttgcattgcagtcaacagtcgaagaagttgaagagattcaggttatagcataagaagagcactgtttcatcgtcttcttgctgttaggaggtctatgaagcagagaagaactttcctttggaaaacaactaaatgaagacagtcacctcgctagaactgacacatgggctgtttttatattcttgaaggccactctctccctacctgaaccaagacctataggtttacatgttatttacattttatatataatatatatatatatatatacacatacattatatatacacaatagtaattctagcaacagaggaaatgacctttaacaggggtataaatctaaatttataaaagtataaatctaaatttcttacccaagacactttaaagatacattatttttctccaggacgtaattcataggaatattaagccttttgtaaatgtccctttagatggtttctcataaggtaaaagaaacttatttccaagcaggaccacctttattgtgtccccagatcacctcacagggcagaaaaatgcccctcagtctgggagaagacctagagagaattatggactccttactggtttttggaaagcaaccaacagctaattccaacaccatgggcagcccatacagtctctaattatctgagaaaatcaaatgatgctgttacaataattacgctggtacaagttaataaaagtgccatgttacagtcaaacagctatgttgctatctataccattgagggcatagttttaaaaagtagttatgctacctgattgtataaggaacaaaactgagagaaaaaatctaaaaggccgcctatgattgaatggaaagattttttttagttgaatttaaataatgtgacttgggggagcctttacaaagagtctttatacctcccttcagcttcctcattttcccttggattacttttgctcaattaaatatgaatttcct

SEQ ID NO: 7097 - DNA, 582 bp, Homo sapiens
aaccgaccgagggggtcgggggaggctgcgttaaggcttccctgagattggtttccttatcattttctccaccgccgctgtcccattttctgatgagtttgcttttaatgatttatccaacagtttgtcttgcagaagaagaagaccattgagagtttcagaacaagcttcctggaacccatgacccatgaagtcttgtcgacatttataccgtctgagggtagcagctcgaaagtagaagaagtggagtgttgccagggacggcagtatctctttgtgtgaccctggcggcttatgggacgttggcttcagacctttgtgatacaccatgctgcgtgggacgatgacggcgtggagaggaatgaggcctgaggtcacactggcttgcctcctcctagccacagcaggctgctttgctgacttgaacgaggtccctcaggtcaccgtccagcctgcgtccaccgtccagaagcccggaggcactgtgatcttgggctgcgtggtggaacctccaaggatgaatgtaacctggcgcctgaatggaaaggagctgaatggctcggatgatgctctgggtgtcct

SEQ ID NO: 7098 - DNA, 2332 bp, Homo sapiens
atttcctcccagcctcgtgcgggaaatggctttaattctgacggcagggctgtgagggactagcgggaacccgagccttttgtcaaggaactgcggcgtcggtggccagtcatccccgccgccgcggagccgctgcactgctgggggatctcccagcagctctgacgagcgcgggctgcagcatgggcagaaaacgctgccctgcagattagctgggtggattttttaagcgcaccccaccccccaaacccataaaataacaaaaccaacccgcagtggccgaccggagatagctaagatgccgcgcaggagagttccaggagcgaattgcaaacccaccgggaaaatgagcgaagagacggtccccgaggctgcctcgccgccgcccccgcaggggcagccttactttgaccgcttctcagaggacgaccccgagtacatgcgccttcgcaaccgggcggcggacctgcggcaggacttcaacctgatggagcagaagaagcgcgtcaccatgatcctgcagagtccctctttcagggaggagctggaaggcctcatccaggagcagatgaagaaggggaacaactcctccaacatctgggccctgcgacagatcgcggacttcatggccagcacctcccacgcagtcttcccgacatcttccatgaatgtctccatgatgacgcctatcaatgacctccacacagctgactccctgaacctggccaaaggggagcggctcatgcggtgcaagatcagcagtgtctaccgactcctggacctctatggctgggcccagctgagtgacacctatgtcacgttgagagtcagcaaggagcaggaccacttcctgatcagccctaagggagtttcttgcagtgaagtcacagcgtccagcctgatcaaggtgaacattctgggagaggtggtggagaagggcagcagctgcttcccagtggacaccacaggcttctgtctgcactcggccatctatgcagcgaggcccgacgtgcgctgcatcatccacctgcacacaccggccacagcagcggtgtcggccatgaagtggggcctcctgcctgtctcccacaatgccctgctggtgggggacatggcctattatgacttcaatggggaaatggagcaggaagccgatcggatcaacctgcagaagtgccttggacccacctgcaagatcctggtgctaagaaaccatggagtggttgctctgggtgacacggtagaggaggcattttacaagatcttccacctgcaggctgcatgtgagatacaggtgtcggctctgtccagtgccgggggagtggagaacctcatcctcctggagcaggagaagcaccggccccatgaggtgggctccgtgcagtgggccgggagcacctttgggcctatgcagaagagtcggctgggggagcatgagtttgaggccctcatgaggatgctggacaacctgggctacagaacaggttacacgtatcgccacccctttgttcaagagaaaaccaaacacaaaagtgaggtggagattccagccacggtcacagccttcgtgtttgaggaggacggtgccccggtgcccgccctgcgacagcatgcccagaagcagcagaaggagaagacccgctggctcaatacgcccaacacctacctgcgggtcaatgtggccgatgaggtccagaggagcatgggcagcccccgacccaagaccacgtggatgaaggctgacgaggtggagaaatccagcagtggcatgccgattcgcatcgaaaacccaaaccaatttgtgcctctctatactgacccccaggaagtactggagatgaggaacaagattcgagaacaaaaccgacaagatgtgaagtcagcggggcctcagtcccagctcctggcgagcgtcattgccgagaagagccgaagcccggtagagcagaggctgcccctgactggcggggaaacgtgtttgccttcggggtcttctgtgcctggggctgggttgcaggacccctgagtcctcatacccaccttcccctgtgatcttgggtgccggtgctcttgctgcaaaatggaggccaacctcacaggggtgctgtgaggaccagggaggacaatgtctgatggcccctgtgggcactgggctggagaacagcagcccagcctgcctgcaggagtgatgcggccggcttccgtacctcctgccatggaactccactctgtcctcccttactaccccgtgaagtggggactcataggcttggggctggagactcccaggtgccccaggtgtgcccagccctgagagtctctgacctctgag

SEQ ID NO: 7099 - DNA, 3946 bp, Homo sapiens
caggctcagaggctgaagcaggaggaaggaaggactggaaggaaaaagagacaggttagagggaaagaggcttgggaagaaaacagcagaaaagaaactgctcattacacttacagagaggcaagtaacggtggagatgaggacagagggaaccaagactctgaaagacaaaaaatacaaatagagcgaaagaggaaaaaaatgtcaagaagaacatccatccggagaaatgaagagaatgaaagttttaagctgcagagccgttctgtgcttttccggcacaaaattatatcgctgattttaagcccttttgcatttgccagccgttgacattaagaggcatgtttaacggtgccaacagcatctccttttccttctcctcttcctcttcttcttcttcctcctcctcctcctctttttcctcctcctcgttctcctcccatcagcaagaagacaaaccgaggacagtcttgaaatatcgaaatttcctctttgggatttgccagcgccaagactgtcggaataaaggacgctgactattgtattattgttattttattaattagtcagtggaaagattacagatgaggaaaggggacgcctgtcacccttcctgtgctaagatttaaaaaaaaatgaggctggattgcgggaagctctaaaatgaagcaaaaggagtaagatttttaaagacagaaagccacaggagcccccacgtagcgcacttttatttgtattttttcagatttttttttgtttcgtggtggtgggggaggtgattgggtggctgactggctgcgggaagctacttcctttccttttggagatgattgtgctattattgtttgccttgctctggatggtggaaggagtcttttcccagcttcactacacggtacaggaggagcaggaacatggcactttcgtggggaatatcgctgaagatctgggtctggacattacaaaactttcggctcgcgggtttcagacggtgcccaactcaaggaccccttacttagacctcaacctggagacaggggtgctgtacgtgaacgagaaaatagaccgcgaacaaatctgcaaacagagcccctcctgtgtcctgcacctggaggtctttctggagaaccccctggagctgttccaggtggagatcgaggtgctggacattaatgacaaccccccctctttcccggagccagacctgacggtggaaatctctgagagcgccacgccaggcactcgcttccccttggagagcgcattcgacccagacgtgggcaccaactccttgcgcgactacgagatcacccccaacagctacttctccctggacgtgcagacccagggggatggcaaccgattcgctgagctggtgctggagaagccactggaccgagagcagcaagcggtgcaccgctacgtgctgaccgcggtggacggaggaggtgggggaggagtaggagaaggagggggaggtggcgggggagcaggcctgcccccccagcagcagcgcaccggcacggccctactcaccatccgagtgctggactccaatgacaatgtgcccgctttcgaccaacccgtctacactgtgtccctaccagagaactctcccccaggcactctcgtgatccagctcaacgccaccgacccggacgagggccagaacggtgaggtcgtgtactccttcagcagccacatttcgccccgggcgcgggagcttttcggactctcgccgcgcactggcagactggaggtaagcggcgagttggactatgaagagagcccagtgtaccaagtgtacgtgcaagccaaggacctgggccccaacgccgtgcctgcgcactgcaaggtgctagtgcgagtactggatgctaatgacaacgcgccagagatcagcttcagcaccgtgaaggaagcggtgagtgagggcgcggcgcccggcactgtggtggcccttttcagcgtgactgaccgcgactcagaggagaatgggcaggtgcagtgcgagctactgggagacgtgcctttccgcctcaagtcttcctttaagaattactacaccatcgttaccgaagcccccctggaccgagaggcgggggactcctacaccctgactgtagtggctcgggaccggggcgagcctgcgctctccaccagtaagtcgatccaggtacaagtgtcggatgtgaacgacaacgcgccgcgtttcagccagccggtctacgacgtgtatgtgactgaaaacaacgtgcctggcgcctacatctacgcggtgagcgccaccgaccgggatgagggcgccaacgcccagcttgcctactctatcctcgagtgccagatccagggcatgagcgtcttcacctacgtttctatcaactctgagaacggctacttgtacgccctgcgctccttcgactatgagcagctgaaggacttcagttttcaggtggaagcccgggacgctggcagcccccaggcgctggctggtaacgccactgtcaacatcctcatagtggatcaaaatgacaacgcccctgccatcgtggcgcctctaccagggcgcaacgggactccagcgcgtgaggtgctgccccgctcggcggagccgggttacctgctcacccgcgtggccgccgtggacgcggacgacggcgagaacgcccggctcacttacagcatcgtgcgtggcaacgaaatgaacctctttcgcatggactggcgcaccggggagctgcgcacagcacgccgagtcccggccaagcgcgacccccagcggccttatgagctggtgatcgaggtgcgcgaccatgggcagccgcccctttcctccaccgccaccctggtggttcagctggtggatggcgccgtggagccccagggcgggggcgggagcggaggcggagggtcaggagagcaccagcgccccagtcgctctggcggcggggaaacctcgctagacctcaccctcatcctcatcatcgcgttgggctcggtgtccttcatcttcctgctggccatgatcgtgctggccgtgcgttgccaaaaagagaagaagctcaacatctatacttgtctggccagcgattgctgcctctgctgctgctgctgcggtggcggaggttcgacctgctgtggccgccaagcccgggcgcgcaagaagaaactcagcaagtcagacatcatgctggtgcagagctccaatgtacccagtaacccggcccaggtgccgatagaggagtccgggggctttggctcccaccaccacaaccagaattactgctatcaggtatgcctgacccctgagtccgccaagaccgacctgatgtttcttaagccctgcagcccttcgcggagtacggacactgagcacaacccctgcggggccatcgtcaccggttacaccgaccagcagcctgatatcatctccaacggaagcattttgtccaacgagactaaacaccagcgagcagagctcagctatctagttgacagacctcgccgagttaacagttctgcattccaggaagccgacatagtaagctctaaggacagtggtcatggagacagtgaacagggagatagtgatcatgatgccaccaaccgtgcccagtcagctggtatggatctcttctccaattgcactgaggaatgtaaagctctgggccactcagatcggtgctggatgccttcttttgtcccttctgatggacgccaggctgctgattatcgcagcaatctgcatgttcctggcatggactctgttccagacactgaggtgtttgaaactccagaagcccagcctggggcagagcggtccttttccacctttggcaaagagaaggcccttcacagcactctggagaggaaggagctggatggactgctgactaatacgcgagcgccttacaaaccaccatatttgagaaaaaaacagagatgc

SEQ ID NO: 7100 - DNA, 2270 bp, Homo sapiens
agccgcggcgcgctgagcgagcaggcggggcgggagcgcccacagctcggagccaccaggcgctgacgaggagcccggctgagggaggatgcgccgctgacgcctgcgggagccgcgcgcctggggcgggaggatgctccagaggggcctctggccgtggcgcacgcggctgctgccgacccctggcacctggcgcccagcgcgcccgtggccgctgccgcctccgccccaggttttgcgtgtgaagctgtgtggaaatgtgaaatactaccagtcacaccattatagtaccgtggtgccacctgatgaaataacagttatttatagacatggccttcccttggtaacacttaccttgccatctagaaaagaacgttgtcaattcgtagtcaaaccaatgttgtcaacagttggttcattccttcaggacctacaaaatgaagataagggtatcaaaactgcagccatcttcacagcagatggcaacatgatttcagcttctaccttgatggatattttgctaatgaatgattttaaacttgtcattaataaaatagcatatgatgtgcagtgtccaaagagagaaaaaccaagtaatgagcacactgctgagatggaacacatgaaatctttggttcacagactatttacaatcttgcatttagaagagtctcagaaaaagagagagcaccatttactggagaaaattgaccacctgaaggaacagctgcagccccttgaacaggtgaaagctggaatagaagctcattcggaagccaaaaccagtggactcctgtgggctggattggcactgctgtccattcagggtggggcactggcctggctcacgtggtgggtgtactcctgggatatcatggagccagttacatacttcatcacatttgcaaattctatggtcttttttgcatactttatagtcactcgacaggattatacttactcagctgttaagagtaggcaatttcttcagttcttccacaagaaatcaaagcaacagcactttgatgtgcagcaatacaacaagttaaaagaagaccttgctaaggctaaagaatccctgaaacaggcgcgtcattctctctgtttgcaaatgcaagtagaagaactcaatgaaaagaattaatcttacagttttaaatgtcgtcagattttccattatgtattgattttgcaacttaggatgtttttgagtcccatggttcattttgattgtttaatctttgttattaaattcttgtaaaacagaagtattgtttgaagttctcaactgagatttttactttttggatttttatgacttgctaatgttagaaagggcttgtatgcgtctatcaaagcaacggtggctgctgttagctaaaaatccttgtcagcttgtcccacgtttattctctatgtggaggtgaaagggtctgtgcttggcattcacttccattcttagacttaatttggaatcatccttttaaaaaaatcagagaccaggtcttgccaaatcaaactcctgggctcaagcaaccctcctgcctcaacctcccacggaatcgtcttgtcattaacttctttttttaatatgcagtagttgggagtaagatctttttatcatttatcaaaaaggcataaatgttccaccaaccataaagtatagttggtactttttgaacttcaactgaaacagtgtatataaacgattgcttttgaacctgcaaatcacaagtttcaggtatcgaagccaaaacagttaactttcttcagcctctggcagattattaacaaaacagtattattcagattctatatcatattaataagaattgaaccttgaaagtaacatctgttattctattaatgtgattgtgtgtgaatgggtctgatgactgttggactgtttgtaggaacttaacatggaagatgctgacagaatcagattttgcaggtgttcaacctatagtggctaagaattatgttttctatttcatcctcagaatgccatacaacaattctggaatgctgattttttttaaagtaggaattaaagtcatacacaaaatgtggtaattcatatgtagatgaaatattaaacatttaaatgaccgagtaaaaaacatctatcaattacacaaatgaacaagaatgtgagttagaaaaatgtaataaaatatgaatttcgaatattttattaagggatgatttaattcctggatttcaaaaacctttaaaaacatcaaacaataaacttttataaaaaagtg

SEQ ID NO: 7101 - DNA, 956 bp, Homo sapiens
ccgggacaggggttcggtccgagcccggtgggaggctcccggagcgcagcctgggcccagcccaccccgcgccggcggccatggcaggcaccctggacctggacaagggctgcacggtggaggagctgctccgcgggtgcatcgaagccttcgatgactccgggaaggtgcgggacccgcagctggtgcgcatgttcctcatgatgcacccctggtacatcccctcctctcagctggcggccaagctgctccacatctaccaacaatcccggaaggacaactccaattccctgcaggtgaaaacgtgccacctggtcaggtactggatctccgccttcccagcggagtttgacttgaacccggagttggctgagcagatcaaggagctgaaggctctgctagaccaagaagggaaccgacggcacagcagcctaatcgacatagacagcgttagactgtgagctcctcgagggcaggaaccgtgtcttactcatctctgtattcccagcgcctagcacagtgcctggcacagaccctacctacaagtggaagcggcaggtgactcagcggaaccctgtgggacagaaaaagcgcaagatgtccctgttgtttgaccacctggagcccatggagctggcggagcatctcacctacttggagtatcgctccttctgcaagatcctgtttcaggactatcacagtttcgtgactcatggctgcactgtggacaaccccgtcctggagcggttcatctccctcttcaacagcgtctcacagtgggtgcagctcatgatcctcagcaaacccacagccccgcagcgggccctggtcatcacacactttgtccacgtggcggagaagctgctacagctgcagaacttcaacacgctgatggcagtggtcgggggcctgagccacagctccatctcccgcctcaaggagacccacagccacgt

SEQ ID NO: 7102 - DNA, 574 bp, Homo sapiens
ataaatgcaaggaacgtgaagaaaaaataattttagtgtcatctgcaaatgaaattgatgttcgtccctgtcctcttaacccaaatgaacacaaaggcactataacttggtataaagatgacagcaagacacctgtatctacagaacaagcctccaggattcatcaacacaaagagaaactttggtttgttcctgctaaggtggaggattcaggacattactattgcgtggagacggaggacttgtgtgcccttatatggagttttttaaaaatgaaaataatgagttacctaaattacagtggtataaggattgcaaacctctacttcttgacaatatacactttagtggagtcaaagataggctcatcgtgatgaatgtggctgaaaagcatagagggaactatacttgtcatgcatcctacacatacttgggcaagcaatatcctattacccgggtaatagaatttattactctagaggaaaacaaacccacaaggcctgtgattgtgagcccagctaatgagacaatggaagtagacttgggatcccagatacaattgatctgtaatgtc

SEQ ID NO: 7103 - DNA, 3373 bp, Homo sapiens
agactctcaggttgatgcagtgttccctcccacaactctgacatgtatataaattctgagctctccaaagcccactgccagttctcttcggggactaactgcaacggagagactcaagatgattccctttttacccatgttttctctactattgctgcttattgttaaccctataaacgccaacaatcattatgacaagatcttggctcatagtcgtatcaggggtcgggaccaaggcccaaatgtctgtgcccttcaacagattttgggcaccaaaaagaaatacttcagcacttgtaagaactggtataaaaagtccatctgtggacagaaaacgactgtgttatatgaatgttgccctggttatatgagaatggaaggaatgaaaggctgcccagcagttttgcccattgaccatgtttatggcactctgggcatcgtgggagccaccacaacgcagcgctattctgacgcctcaaaactgagggaggagatcgagggaaagggatccttcacttactttgcaccgagtaatgaggcttgggacaacttggattctgatatccgtagaggtttggagagcaacgtgaatgttgaattactgaatgctttacatagtcacatgattaataagagaatgttgaccaaggacttaaaaaatggcatgattattccttcaatgtataacaatttggggcttttcattaaccattatcctaatggggttgtcactgttaattgtgctcgaatcatccatgggaaccagattgcaacaaatggtgttgtccatgtcattgaccgtgtgcttacacaaattggtacctcaattcaagacttcattgaagcagaagatgacctttcatcttttagagcagctgccatcacatcggacatattggaggcccttggaagagacggtcacttcacactctttgctcccaccaatgaggcttttgagaaacttccacgaggtgtcctagaaaggatcatgggagacaaagtggcttccgaagctcttatgaagtaccacatcttaaatactctccagtgttctgagtctattatgggaggagcagtctttgagacgctggaaggaaatacaattgagataggatgtgacggtgacagtataacagtaaatggaatcaaaatggtgaacaaaaaggatattgtgacaaataatggtgtgatccatttgattgatcaggtcctaattcctgattctgccaaacaagttattgagctggctggaaaacagcaaaccaccttcacggatcttgtggcccaattaggcttggcatctgctctgaggccagatggagaatacactttgctggcacctgtgaataatgcattttctgatgatactctcagcatggatcagcgcctccttaaattaattctgcagaatcacatattgaaagtaaaagttggccttaatgagctttacaacgggcaaatactggaaaccatcggaggcaaacagctcagagtcttcgtatatcgtacagctgtctgcattgaaaattcatgcatggagaaagggagtaagcaagggagaaacggtgcgattcacatattccgcgagatcatcaagccagcagagaaatccctccatgaaaagttaaaacaagataagcgctttagcaccttcctcagcctacttgaagctgcagacttgaaagagctcctgacacaacctggagactggacattatttgtgccaaccaatgatgcttttaagggaatgactagtgaagaaaaagaaattctgatacgggacaaaaatgctcttcaaaacatcattctttatcacctgacaccaggagttttcattggaaaaggatttgaacctggtgttactaacattttaaagaccacacaaggaagcaaaatctttctgaaagaagtaaatgatacacttctggtgaatgaattgaaatcaaaagaatctgacatcatgacaacaaatggtgtaattcatgttgtagataaactcctctatccagcagacacacctgttggaaatgatcaactgctggaaatacttaataaattaatcaaatacatccaaattaagtttgttcgtggtagcaccttcaaagaaatccccgtgactgtctatacaactaaaattataaccaaagttgtggaaccaaaaattaaagtgattgaaggcagtcttcagcctattatcaaaactgaaggacccacactaacaaaagtcaaaattgaaggtgaacctgaattcagactgattaaagaaggtgaaacaataactgaagtgatccatggagagccaattattaaaaaatacaccaaaatcattgatggagtgcctgtggaaataactgaaaaagagacacgagaagaacgaatcattacaggtcctgaaataaaatacactaggatttctactggaggtggagaaacagaagaaactctgaagaaattgttacaagaagaggtcaccaaggtcaccaaattcattgaaggtggtgatggtcatttatttgaagatgaagaaattaaaagactgcttcagggagacacacccgtgaggaagttgcaagccaacaaaaaagttcaaggatctagaagacgattaagggaaggtcgttctcagtgaaaatccaaaaaccagaaaaaaatgtttatacaaccctaagtcaataacctgaccttagaaaattgtgagagccaagttgacttcaggaactgaaacatcagcacaaagaagcaatcatcaaataattctgaacacaaatttaatatttttttttctgaatgagaaacatgagggaaattgtggagttagcctcctgtggtaaaggaattgaagaaaatataacaccttacaccctttttcatcttgacattaaaagttctggctaactttggaatccattagagaaaaatccttgtcaccagattcattacaattcaaatcgaagagttgtgaactgttatcccattgaaaagaccgagccttgtatgtatgttatggatacataaaatgcacgcaagccattatctctccatgggaagctaagttataaaaataggtgcttggtgtacaaaactttttatatcaaaaggctttgcacatttctatatgagtgggtttactggtaaattatgttattttttacaactaattttgtactctcagaatgtttgtcatatgcttcttgcaatgcatattttttaatctcaaacgtttcaataaaaccatttttcagatataaagagaattacttcaaattgagtaattcagaaaaactcaagatttaagttaaaaagtggtttggacttgggaacaggactttatacctcttttactgtaacaagtactcattaaaggaaattgaat

SEQ ID NO: 7104 - DNA, 709 bp, Homo sapiens
gtgactccctcctgagaagctggaccccttggtaaaagacaaggccttctccaagacttaaaacacacttcacgcagtcacagaaagagctcatagaccagactgcggggcttcaaagccttctatcttatttaatcatctgtaaatagtttaaagaagaatatgaaagtgttactcagacttatttgtttcatagctctactgatttcttctctggaggctgataaatgcaaggaacgtgaagaaaaaataattttagtgtcatctgcaaatgaaattgatgttcgtccctgtcctcttaacccaaatgaacacaaaggcactataacttggtataaagatgacagcaagacacctgtatctacagaacaagcctccaggattcatcaacacaaagagaaactttggtttgttcctgctaaggtggaggattcaggacattactattgcgtggtaagaaattcatcttactgcctcagaattaaaataagtgcaaaatttgtggagaatgagcctaacttatgttataatgcacaagccatatttaagcagaaactacccgttgcaggagacggaggacttgtgtgcccttatatggagttttttaaaaatgaaaataatgagttacctaaattacagtggtataaggattgcaaacctctacttcttgacaatatacactttagtggagtcaaagataggctcatcg

SEQ ID NO: 7105 - DNA, 3957 bp, Homo sapiens
agcgcagcccgcagaagcccggtcagcgcacgtgcccgcgagacctgcaaacttgtgccaccggctctgcccgtccccggggagcccgaacgccccgcagccctcacccctcccgccagtctccagccatgggctgctttgaatgctgcatcaagtgtctgggaggagtcccctacgcctccctggtggccaccatcctctgcttctccggggtggccttattctgcggctgtgggcatgtggctctcgcaggcaccgtggcgattcttgagcaacacttctccaccaacgccagtgaccatgccttgctgagcgaggtgatacaactgatgcagtatgtcatctatggaattgcgtcctttttcttcttgtatgggatcattctgttggcagaaggcttttacaccacaagtgcagtgaaagaactgcacggtgagtttaaaacaaccgcttgtggccgatgcatcagtggaatgttcgttttcctcacctatgtgcttggagtggcctggctgggtgtgtttggtttctcagcggtgcccgtgtttatgttctacaacatatggtcaacttgtgaagtcatcaagtcaccgcagaccaacgggaccacgggtgtggagcagatctgtgtggatatccgacaatacggtatcattccttggaatgctttccccggaaaaatatgtggctctgccctggagaacatctgcaacacaaacgagttctacatgtcctatcacctgttcattgtggcctgtgcaggagctggtgccaccgtcattgccctgctgatctacatgatggctactacatataactatgcggttttgaagtttaagagtcgggaagattgctgcactaaattctaaattgcataaggagttttagagagctatgctctgtagcatgaaatatcactgacactccagactaaagcagagtctaggtttctgcaattttgttacagtaatttgtaaatagctttagtaaactcaccttgcatggtagattaataagatgacttactgtacatgaattacacaataatgagatctggtggctatttccacattttgaaaaggattcagttatttactgacagtggtgagcatcctttttaaaataatgttctcatacttaaacattagagagcagtatctttaaatgaattattaacactttggaatacttacattttctgttatttttgattgcctgataaccagtttcaatgatgaaaatgaaaacaagtgctgaagatgaaatggaagagaaccgttttaatctggattttgttttgtcacacctggaaaatactttgcaaatatgttctaaattgaaaacaatttttttatgatcacatggttcactaccaaatgaccctcaaataagccagatgaaaatttgaagaaaaaggtcacccagttctctggaaaaaaaaaaaaaaaaaaaaaaaaaaggatttatatgtgggtagttttttttttggtacaacacaatcattctgttagagcccacaaaattggtaaccttaaattgtgtgttttggtaagtaataactaactgtttcctcatagctagttctcaagctgcatgtaagattttaacgggaagagaaaataggcctggacctgaaggtctcaaatatgttgagaagaaagtatgaactataaggaacttgagatgtagatttattttgcaggaaatacgaggaaaataggaaagaagtgtttgccgcatcaagtgtaaagaatgatactgaggatttttacattttatgaaatgaaataatggcatttacaaaatgaaaaatgtagtttcacaactaagttttgttaacagagactgcatgctttgcttatagttcttaattttggttttgacattcatttaattttttccatgttaaatatgtagtttaattatttactcaaaataaacattgttcatgcttttaggcctttgggggaattgatttttatccacaggtagaaaatggtctttgcacacactacacttatttcaaatatacaatgtgctcccgaactttcgcattagtctttaaaattactctcaaaatggtattaaaaaaaaaaaaaaaagcaccctctcgtatttcatttttgctttttcttaacaatacctttggccatttttttccagttcactatgtttgtatactaacttttcttcagccttttaatgcgaagccaactagtagagcatgctttcaggatctgacagctctgctagtagagcgagtatttattaatacagaattaaccttcgcccctttaaagtcaagtctgtctaatctaactagcgcctcgctttgccttctcacaatgctcactagccatcatgctcacccttctcttccagatccacttcctcatgatactgtcttctaactgggcttacttaaaggatgcgagcaaaatgcaggcttaccaggatatcaaagcaaaggaagaacaggaactgcaagatatccagtctcggtcaaaagaacaactcaattcttacacataaatgtttgccagagtgtttcggccgacgtatttacagctctgacaaatcatcagacagctgctctgcagtacagatgtgtatcccaccaaactaatgtagatgtacaaacacttcactgtctgtctcaagctgctgggatgtatctctaggaaaaccttccagtgggtaaatctttttctttagaacaaatattggaggtttcatgttagccattttaaaaggcaacactttgacaaaatgatcgttcatactttgggaatttgtggcatgttcacatttattgctagggcaattctaccaagacactcaatggaatatgtcacactccttaatagggacctgtgactccttaataaggacctgtgacatgcccagcatcaagggataagaccgtaaattcacatatatgccatctgtcctcaagtgttatctacataggaaataaaatggaattgatgtaaagttccatttctgacagctgacatttattaaactttggatcaaagataatgtgattcttatgattgatttctcaaactagcttttccctcccaagtccaggacccattaatttcctgagccaatcagaaatatatttttcaataatgctaaaattagctacaattctgctgaccctactattaaagaatctggatgctggactcactgacaagctttccagaagcaattttataacagatttcattttaacaaaatactgatccaattttcattattcttgagaaatgtcagctttgccttaatgagtatttgctttaaatttctaagaatttatatcataactagagacccaaatatctttcacagaattttgttccataaatgtttttcttaattattaagaagtgttaccttattaaaatgaccaccattctaaaccatttttcagtggtctggatacgaagtttacagtttcataccaactatctaaaacctaattgcaaattgaccacagacctctaacctcctacttttatagacttgaatacttaagtaatttaaattagggttggtatttcatttttttcttatctaaatcttagtttcctggaataataaagtttgatgttcagcaagagaactgcttgagtttaagccattttcaaaagaaacttgccttttacattattgtgttccagaacattaagtgactgtaggtactgggtattagtgatggtaaactttgtgttgctctttatgaaatgatccatataactgttgggtgcatcagtgcttttcaaaggggctgcttactatagggttaactatgtatattcattgttaagagttaacttgtggtttggctgtttcctggattttataacatacatgtgcagaaatgtattcaaatgaaaggaagcatacctttatcaagatgctattaaaattgaacatcaagtataa

SEQ ID NO: 7106 - DNA, 516 bp, Homo sapiens
gcagccaacaggacaaataaagattaaaagggaggactatgaatctcttccaaaagaggttgccagtgctaaacccaaagtattgctagacgtgaaactgaaggctgaagattttatagtggatgtttcacaacttctgccagagaaatttgcagagcagctgattcgagtatattgtaagaaggtggacagaaagagtttgtatgccgcaagacaatattttgttcagtggtgtgcagacagaaatttcaccaagccgcaggtaggtggcctgttactcacaaactttgcacaattttttatttttaagtaaaaaccaaaagtaagtctatctgctgaaaagttcccatttaagttatagtcatttggttatggttttgaaaataaggtctttcactttctttccttttaaaatgtctgaatctgtgtcagccagtgatttcttcctacaggagttgggaatggatactgtttagcattattgtcctaataataaaaatgtgaacatgtaaataa

SEQ ID NO: 7107 - DNA, 322 bp, Homo sapiens
tgtttcctttcttgaagtgcccttatcagatgttcagagaattccaacttcttacaagaacagatatttataagaaaacaaggcacattttggaatcctattcagaaaatatactgacttctttttcagtggtggacaatccaatcaatattgtattgcaagaaaaaatgaaacattacacagatgaagacatgttgaaatgtgcaagtgtccacacctgtgttggaagttaaaaaccctttcaacatggaggtctgcgaattttctttatatttagaaagggagaggctcacaaaggtggacgactgtgttacagccttgg

SEQ ID NO: 7108 - DNA, 2777 bp, Homo sapiens
gcagtcggctcggaattggacttgggaggcgcggtgaggagtcaggcttaaaacttgttggaggggagtaaccagcctgctcctctcgctctcctcctcgtctgcgccgcgtttcagaggttgcccatcagccttgtgatttatttttatatctgctttttataaagagagaaatatatatatatatatatatttttttttttcttcttaagagaaaattcctgttccaagagaaaataaggcaacatcaatgaaggagagaagagccagccagaaattatccagcaaatctatcatggatcctaatcagaacgtgaaatgcaagatagttgtggtgggagacagtcagtgtggaaaaactgcgctgctccatgtcttcgccaaggactgcttccccgagaattacgttcctacagtgtttgagaattacacggccagttttgaaatcgacacacaaagaatagagttgagcctgtgggacacttcgggttctccttactatgacaatgtccgccccctctcttaccctgattcggatgctgtgctgatttgctttgacatcagtagaccagagaccctggacagtgtcctcaaaaagtggaaaggtgaaatccaggaattttgtccaaataccaaaatgctcttggtcggctgcaagtctgatctgcggacagatgttagtacattagtagagctctccaatcacaggcagacgccagtgtcctatgaccagggggcaaatatggccaaacagattggagcagctacttatatcgaatgctcagctttacagtcggaaaatagcgtcagagacatttttcacgttgccaccttggcatgtgtaaataagacaaataaaaacgttaagcggaacaaatcacagagagccacaaagcggatttcacacatgcctagcagaccagaactctcggcagttgctacggacttacgaaaggacaaagcgaagagctgcactgtgatgtgaatctttcattatctttaatgaagacaaaggaatctagtgtaaaaaacaacagcaaacaaaaaggtgaagtctaaatgaagtgcacagccaaagtcatgtataccagaggcttaggaggcgtttgagaggatactcatctttttggaatcctgaccttaggttcggcatgtagaccaagtgatgagaagtgaatacatggaagagtttttaagtgtgacttgaaaaatatgccaaaaaatgagagatacaaatgagctagaggaagatgaggggggatgcgagtacctccaagaagaaaaatcacactctgaatggtgcttgcatttttgggttttttttttttgttataatctattcatggatctccactttgatttaatttttaaatgttttaatctcctttacaaaaagtatacgttaatataccgtcctcaagggggaactggcactgtgaccttagcatttagttttctagaggatgtgatctaatttctttctagctcatcattaaaaaggaaattgtatcaggacccatgggatatatccagaggcaaactttatgaggctttgaaatcttgccttcctgaagatagctgagtaggatggttctaaggaaagcctttgcaatcttgcaagatttgtagaccagcactacaaagatcgcatagatcaaataggaaaaaaaatgtcgatttttattcagtctgatggttctgttcttcattgtgattgtcattaaaaagtggtaaattgctcaatgtaatatttttgtgcgctgtttagaagttgtgtgattttttgccatcgttgataaaaatgcaaagtcaaataaaaggtgtcttggtttgatgtcatagaatgatccaaggagagaaaaaaggtagttactgttttcaccagaaaaggtaatgagtgaaggaaagaatagtagcagaaagcacagtttgtgagtaaagctgtctggaattaagttaccaaaaatacaaagcaaaaggactattattttgggttgaagctccaaaactgacagcatctgataatctgttggtttatttcacttttcattaaatgaacattgatgagagaagatgccacttacccaagctttagagaatccctagtggaagattatatgataaactttcagtcctgacataacactagggcatttctagagtgtcattgctaaaacctcactgaacagatgcagccaaggtctgtgttcagcacttggtctctgttgttacgtaaaataataagcatttaaaatagtttacagatatttttgaccagttccttttagagattctttcagagaagaaaccagatctgacctgtttattgttggcgcttgttgaaaacgagctttctttcccatgatagtgcttcgtttttgaagtgttgaagctgtgctccccttaaatcgtggcaggagagattaaggtaattacaacactcagttctatgtcttacaagcactttgtcttgtctctgcaagaaaattcgattccagtcatttcccataaaatacagacattttaccaacataatatgctttgattgatgcagcattatgctttgggcagtattacaaaatagctggcgagtgctttctgtatttaaatattgtaaaaagaaaataagttataactgttataaagcagaacttttgttgcattttttaaactgttgaagtcactgtgtatgtttgtttggtcaatgtttccgcagtatttattaaaacatactttttttttcttcaaataaaaaagtaaccatgtctttgtctaaa

SEQ ID NO: 7109 - DNA, 1612 bp, Homo sapiens
gaatataaatagtttctggaaaggacactgacaacttcaaagcaaaatgaagttctttctgttgcttttcaccattgggttctgctgggctcagtattccccaaatacacaacaaggacggacatctattgttcatctgtttgaatggcgatgggttgatattgctcttgaatgtgagcgatatttagctccgaagggatttggaggggttcaggtctctccaccaaatgaaaatgttgcaatttacaaccctttcagaccttggtgggaaagataccaaccagttagctataaattatgcacaagatctggaaatgaagatgaatttagaaacatggtgactagatgtaacaatgttggggttcgtatttatgtggatgctgtaattaatcatatgtgtggtaacgctgtgagtgcaggaacaagcagtacctgtggaagttacttcaaccctggaagtagggactttccagcagtcccatattctggatgggatttcaatgatggtaaatgtaaaactggaagtggagatatcgagaactacaatgatgctactcaggtcagagattgtcgtctgactggtcttcttgatcttgcactggagaaggattacgtgcgttctaagattgccgaatatatgaaccatctcattgacattggtgttgcagggttcagacttgatgcttccaagcacatgtggcctggagacataaaggcaattttggacaaactgcataatctaaacagtaactggttccctgcaggaagtaaacctttcatttaccaggaggtaattgatctgggtggtgagccaattaaaagcagtgactactttggtaatggccgggtgacagaattcaagtatggtgcaaaactcggcacagttattcgcaagtggaatggagagaagatgtcttacttaaagaactggggagaaggttggggtttcgtaccttctgacagagcgcttgtctttgtggataaccatgacaatcaacgaggacatggggctggaggagcctctattcttaccttctgggatgctaggctgtacaaaatggcagttggatttatgcttgctcatccttacggatttacacgagtaatgtcaagctaccgttggccaagacagtttcaaaatggaaacgatgttaatgattgggttgggccaccaaataataatggagtaattaaagaagttactattaatccagacactacttgtggcaatgactgggtctgtgaacatcgatggcgccaaataaggaacatggttaatttccgcaatgtagtggatggccagccttttacaaactggtatgataatgggagcaaccaagtggcttttgggagaggaaacagaggattcattgttttcaacaatgatgactggtcattttctttaactttgcaaactggtcttcctgctggcacatactgtgatgtcatttctggagataaaattaatggcaattgcacaggcattaaaatttacgtttctgatgatggcaaagctcatttttctattagtaactctgctgaagatccatttattgcaattcatgctgaatctaaattgtaaaatttaaaattaaatgcatgtcctcaaaac

SEQ ID NO: 7110 - DNA, 3335 bp, Homo sapiens
cttttcggccaccgctcgcttcaatatggctgcccccagggagagacgaggctaccatgaaggagccgagcgcagaccctgagtccgtcacccatggatcgcagcgcggagttcaggaaatggaaggcgcaatgtttgagcaaagcggacctcagccggaagggcagtgttgacgaggatgtggtagagcttgtgcagtttctgaacatgcgagatcagtttttcaccaccagctcctgcgctggccgcatcctactccttgaccggggtataaatggttttgaggttcagaaacaaaactgttgctggctactggttacacacaaactttgtgtaaaagatgatgtgcattccatggcaatagattctggtttcaggaactctggcataacggtgggaaagagaggaaaaactatgttggctgtccggagtacacatggcttagaagttccattaagccataagggaaaactgatggtgacagaggaatatattgacttcctgttaaatgtggcaaatcaaaaaatggaggaaaacaagaaaagaattgagaggttttacaactgcctacagcatgctttggaaagggaaacgatgactaacttacatcccaagatcaaagagaaaaataactcatcatatattcataagaaaaaaagaaacccagaaaaaacacgtgcccagtgtattactaaagaaagtgatgaagaacttgaaaatgatgatgatgatgatctaggaatcaatgttaccatcttccctgaagattactaagctttggttctgatgtgtcttggccgtaatgtttctagtaggttttataaagctgctcttcataagagtattttagtttgttgagtgtatcagccattcataagccagtaatgacaagtgcagagcttcaaactataactttgttgcccagaggatgtgcagttgtcatctaagctctcagcagtacccggcttatcctacgacttcacctgaaatgctatagttatccctacttttttaccagtttctcccagaagcacctgcttaataaatcaaagatgtttgaatggtgtcttattctgaaataacctgacctaagacaggtatttagattattttggatacattttgaaaagggatagcataaatattttaagtaaaaagacctttattttaaataatagtggatattttaatgctggaaattagcattatagttgatatgccagaaattatatctttggttgtgatttaaacttatgctataaactaaattaatgatgtaaatacatagttttaaacattcttttagggacatgtaacttttaagtatcacttcaataatacgtattattataggaacaaagatttgggaataattgattacaggtgaggaagtactggaattccagttcaaggagataccatttcatttaggactaaaaggacaagatacaagttcacatgatgggaaaaatcagaaaacctctcgcagacaaagggtatataatggatatgaggcatcaaaaagcatggtatagtcagtgatggggaatagtccagaaaggctgaaacacagcatgtgatgcgagtcaaggtagttgatgcccaactgtgaagggccgttctaatctagcatggaggtagacagtgtttccttaatatggctgcatatcagaattacctaggtcaggacgaggcatggagatgctactttaataggccctgccgcagatcttccaaaccagaatcttaatcctggagtctaggaatctttatttttcacacaactcatccaagtggttctgataaaatcagtccagcacttttagaacccactgataacagacttattcctggagacagcatttgaggaggaattgaagatttttctaatgaaaagaaaaagggtcacatgaacagatgttgcagtgtacctgtgccagggatttcatgtgtacactttataggagaataagcaagagcttaggtaagttatagtccttaccattgggtctaaggcagtttccaggaaagcatggcaactcgttcagctatgtaagttgaactctgtaccacttgggagggaacattcccctagatgacaatgtcagtggcactcgaagttgtgcagtgcacattcttatctaccaacatatacagcagtccttctgggaaggaaatttgggcaggaaagggaactcacagtgtcggaatgcctggagcatttcttctagtctggtggacagaatatgaaagtatctgcctggcagtgcagtaaatgaaaagagaagataaatgaataaaaaaaaaagttataaataacagtaggaaagagagagtgcaggtggaacgagcctatcctgtggtgaaatgacaacacattctgcagttttaaaatctaagaggctcattgacttttcttcattcatttaaattgatctccaagaaaactatgtattttaaagattccataaactgaatatatgaatgagaattaagaagagaggggctgcttcctaatctgtttatataaggtatagtatagtataatctgtttatataaggttagtagagaggagacaccaggtgctggccataaacctaagaagacattgaatcccattcactccttaacattccttaatatacattcatgagctacataacattttaatcatcaatgatggaccatataccatatacgatatggtggccccataagattataatggacctgaaaaattcctattgctagtgatgtggtcattgtaaagctgtagcacaacacattacccacgtttgtggtgacagtcatataaaagtatggtacatataattatgtacagtgcatacataatacttgataatatgttactggtttgtgtctttgctatgctttttatcattattttagggtatactacttaaaatgttaactgtaaaacagcttctgacaggtccttcaggaagtactccagaagaaggcattgttatcatagaaggtgacagcttcatgtgtgttattgcccctgaagaccttccagtggtacaagatgtggaggaggaagacagtgatactgaggattctgaccctgtgtaggcttaggctaatgtgtgtgtttatatcttagtttttcacaaaaaggtttttccaatgttaaaaaaaatatataaaaaagcttatagaataaggatataaagaaatattttgtacagctgtacaataagctaagcattattaccaaagagtcaaaaagttttaagaaattaaagtttataaaccaaatgttcattgtgagccaaggttaatttattgaagaaataaaacatttttaatg

SEQ ID NO: 7111 - DNA, 1061 bp, Homo sapiens
actaaaccacagctgtcccctggaataaggcaagggggagtgtagagcagagcagaagcctgagccagacggagagccacctcctctcccaggaactgaacccaaaggatcacctggtattccctgagagtacagatttctccggcgtggccctcaagggacagacatggctcagcggatgacaacacagctgctgctccttctagtgtgggtggctgtagtaggggaggctcagacaaggattgcatgggccaggactgagcttctcaatgtctgcatgaacgccaagcaccacaaggaaaagccaggccccgaggacaagttgcatgagcagtgtcgaccctggaggaagaatgcctgctgttctaccaacaccagccaggaagcccataaggatgtttcctacctatatagattcaactggaaccactgtggagagatggcacctgcctgcaaacggcatttcatccaggacacctgcctctacgagtgctcccccaacttggggccctggatccagcaggtggatcagagctggcgcaaagagcgggtactgaacgtgcccctgtgcaaagaggactgtgagcaatggtgggaagattgtcgcacctcctacacctgcaagagcaactggcacaagggctggaactggacttcagggtttaacaagtgcgcagtgggagctgcctgccaacctttccatttctacttccccacacccactgttctgtgcaatgaaatctggactcactcctacaaggtcagcaactacagccgagggagtggccgctgcatccagatgtggttcgacccagcccagggcaaccccaatgaggaggtggcgaggttctatgctgcagccatgagtggggctgggccctgggcagcctggcctttcctgcttagcctggccctaatgctgctgtggctgctcagctgacctccttttaccttctgatacctggaaatccctgccctgttcagccccacagctcccaactatttggttcctgctccatggtcgggcctctgacagccactttgaataaaccagacaccgc

SEQ ID NO: 7112 - DNA, 1807 bp, Homo sapiens
atctccgcgcacagtggtggccaccgcgactggtgctgaagtgtcggcgtgtgccgggcgctccgctgggacccgggttgctcgccctgagtctcagctttctcatctgtacggttgggacaagtacagtaaccctcgcccgtcaagacgggccagggctgtggcgagggtccacgccttagagcaggcacctatcttgtgcagggccctgagatggggtctgactcagttcctgcggggaacttcaccagtgacccagtcagtgcccttcagttaaagaccaccaggagcacacttatatcatggaaatcaggacagtggcagttcggattgtggcaatcaaaggggtggaaagtgaattctatcttgcaatgaacgaggaaggaaaactctatgcaaaggtattgataattgatagcttaggcttaatttttaaaactcatttttgttgaaatatctcaccattctgaaaagtaaacatggacttaatctatctccaactgtataatttaatgattttattaaaacactttatactcaaatgttaagaaaaaatgttttctgtgtgactttggacaaatggcttgttctttggattctggtttcttcatctgtaaaatgagttgaattagctgacctctaaggagccttccagctctaacattccatgtgcattttagatatttaaaatccaaaatttccatttgccagtattaaagctctttttgctaaagttcacccaatttgcacattgctgacatgaaaattcttgggaaaaaatcttgaaatgtttagttcattcatcaacatcaatctcacaatcatgggctttgaactgtaattattcacattgttcccacttcactacaatgcaaaatatgtaacagttcatcccactgtaataaaatataattggctttcctttgtattcccacagctcagcataatgcctggaacaggctaattatataatgatacaggtttaattgaatgaacaaatggttgcatggatgaacaaacaaattaaccttttatcttccattaccactgaagacagtgtacaagtaaataaagaaaagttgtgaaacaagtctctcacctgagggaggcagaggttctgctaattctaccaaatttccagtggttaaagaatgagtgatgtgggaagagtaatttgaggcctgttacttagggggaaataggtcctaattttaaagaatagttgacatgaacttccaaaaagctacacatatttcacactagctgtgcattatgtggtgtctttatttcaaatttaagatacctttttatgcaaatatactacataagtctagctaataaaccacattaggcctgctcaatctgagggttaaaaaaagttgtgtatgtttcaattctaccaaatattgctgcttactcttcgtttaattgagcctctctaaaaatcatttggataatgtttgtgtgtttgtttgtttgtttgaacagaaagaatgcaatgaagattgtaacttcaaagaactaattctggaaaaccattacaacacatatgcagcagctaaatggacacacaatggaggggaaatgtttgttgccttaaatcaaaaggggattcctgtaagaggaaaaaaaacgaagaaagaacaaaaaacagcccactttcttcctatggcaataacttaattgcatatggtatataaagaaccagttccagtagggagatttctttaagtggactgttttctttcttctcaaaattttctttccttttattttttagtaatcaagaaaggctggaaaactactg

SEQ ID NO: 7113 - DNA, 401 bp, Homo sapiens
ggcaggcacagacaccaaggacagagacgctggctaggagctttggttcggagacaggcaaaggagccatgtgtggagagcctggtttctcagtacttccagaccgtgactgactatggcaaggacctgatggagaaggtcaagagcccagagcttcaggccgaggccaagtcttactttgaaaagtcaaaggagcagctgacacccctgatcaagaaggctggaacggaactggttaacttcttgagctatttcgtggaacttggaacacagcctgccacccagtgaagtgtccagaccattgtcttccaaccccagctggcctctagaacacccactggccagtcctagagctcctgtccctacccactctttgctacaataaatgctgaatgaatcca

SEQ ID NO: 7114 - DNA, 402 bp, Homo sapiens
actccgccttccacgtgcacccactgcctcttcccttctcgcttgggaactctagtctcgcctcgggttgcaatggaccccaactgctcctgtgccgctggtgtctcctgcacctgcgccagctcctgcaagtgcaaagagtgcaaatgcacctcctgcaagaagagctgctgctcctgctgccctgtgggctgtgccaagtgtgcccagggctgcatctgcaaaggggcatcggagaagtgcagctgctgcgcctgatgtcgggacagccctgctcccaagtacaaatagagtgacccgtaaaatccaggattttttgttttttgctacaatcttgacccctttgctacattcctttttttctgtgaaatatgtgaataataattaaacacttagacttga

SEQ ID NO: 7115 - DNA, 560 bp, Homo sapiens
agtaggtatggagaagccaagggaggcactaagcctctcctgttcctagaacaagttaggctcctgttccttcacccacctttcttcttgtctagctccctactcctgatccatgccttccagtatgtcatctatggaactgcctctttcttcttcctttatggggccctcctgctggctgagggcttctacaccaccggcgcagtcaggcagatctttggcgactacaagaccaccatctgcggcaagggcctgagcgcaacgtttgtgggcatcacctatgccctgaccgttgtgtggctcctggtgtttgcctgctctgctgtgcctgtgtacatttacttcaacacctggaccacctgccagtctattgccttccccagcaagacctctgccagtataggcagtctctgtgctgatgccagaatgtatggtgttctcccatggaatgctttccctggcaaggtttgtggctccaaccttctgtccatctgcaaaacagctgagttccaaatgaccttccacctgtttattgctgcatttgtgggggctgcagctac

SEQ ID NO: 7116 - DNA, 3999 bp, Homo sapiens
gcctcgggaacgtgcggctccctgtgcctcgggaacgtgcggctccctgtgcctcagcgcctgcccaggccacggaaaggggaaccgctgggcggccgggacggagagcgagtgtccttgggtgaaaaagggaactgctcgcctttctgggaattgtttactctgagagaagggcggggggaagtggcgggtgggggaggggatcttgaccctttgctcctgaggactgtcgaccggcgagccctagatcttaatatttgccagtgatgcctgcaaaaatgtgacattacatgttccctccaaactagatgccgagaaacttgttggtagagttaacctgaaagagtgctttacagctgcaaatctaattcattcaagtgatcctgacttccaaattttggaggatggttcagtctatacaacaaatactattctattgtcctcggagaagagaagttttaccatattactttccaacactgagaaccaagaaaagaagaaaatatttgtctttttggagcatcaaacaaaggtcctaaagaaaagacatactaaagaaaaagttctaaggcgcgccaagagaagatgggctccaattccttgttcgatgctagaaaactccttgggtccttttccacttttccttcaacaggttcaatctgacacggcccaaaactataccatatactattccataagaggtcctggagttgaccaagaacctcggaatttattttatgtggagagagacactggaaacttgtattgtactcgtcctgtagatcgtgagcagtatgaatcttttgagataattgcctttgcaacaactccagatgggtatactccagaacttccactgcccctaataatcaaaatagaggatgaaaatgataactacccaatttttacagaagaaacttatacttttacaatttttgaaaattgcagagtggggcactactgtgggacaagtgtgtgctactgacaaagatgagcctgacacgatgcacacacgcctgaagtactccatcattgggcaggtgccaccatcacccaccctattttctatgcatccaactacaggcgtgatcaccacaacatcatctcagctagacagagagttaattgacaagtaccagttgaaaataaaagtacaagacatggatggtcagtattttggtctacagacaacttcaacttgtatcattaacattgatgatgtaaatgaccacttgccaacatttactcgtacttcttatgtgacatcagtggaagaaaatacagttgatgtggaaatcttacgagttactgttgaggataaggacttagtgaatactgctaactggagagctaattataccattttaaagggcaatgaaaatggcaattttaaaattgtaacagatgccaaaaccaatgaaggagttctttgtgtagttaagcctttgaattatgaagaaaagcaacagatgatcttgcaaattggtgtagttaatgaagctccattttccagagaggctagtccaagatcagccatgagcacagcaacagttactgttaatgtagaagatcaggatgagggccctgagtgtaaccctccaatacagactgttcgcatgaaagaaaatgcagaagtgggaacaacaagcaatggatataaagcatatgacccagaaacaagaagtagcagtggcataaggtataagaaattaactgatccaacagggtgggtcaccattgatgaaaatacaggatcaatcaaagttttcagaagcctggatagagaggcagagaccatcaaaaatggcatatataatattacagtccttgcatcagaccaaggagggagaacatgtacggggacactgggcattatacttcaagacgtgaatgataacagcccattcatacctaaaaagacagtgatcatctgcaaacccaccatgtcatctgcggagattgttgcggttgatcctgatgagcctatccatggcccaccctttgactttagtctggagagttctacttcagaagtacagagaatgtggagactgaaagcaattaatgatacagcagcacgtctttcctatcagaatgatcctccatttggctcatatgtagtacctataacagtgagagatagacttggcatgtctagtgtcacttcattggatgttacactgtgtgactgcattaccgaaaatgactgcacacatcgtgtagatccaaggattggcggtggaggagtacaacttggaaagtgggccatccttgcaatattgttgggcatagcattgctcttttgcatcctgtttacgctggtctgtggggcttctgggacgtctaaacaaccaaaagtaattcctgatgatttagcccagcagaacctaattgtatcaaacacagaagctcctggagatgacaaagtgtattctgcgaatggcttcacaacccaaactgtgggcgcttctgctcagggagtttgtggcaccgtgggatcaggaatcaaaaacggaggtcaggagaccatcgaaatggtgaaaggaggacaccagacctcggaatcctgccggggggctggccaccatcacaccctggactcctgcaggggaggacacacggaggtggacaactgcagatacacttactcggagtggcacagttttactcagccccgtcttggtgaaaaagtgtatctgtgtaatcaagatgaaaatcacaagcatgcccaagactatgtcctgacatataactatgaaggaagaggatcggtggctgggtctgtaggttgttgcagtgaacgacaagaagaagatgggcttgaatttttggataatttggagcccaaatttaggacactagcagaagcatgcatgaagagatgagtgtgttctaataagtctctgaaagccagtggctttatgacttttaaaaaaaattacaaaccaagaattttttaaagcagaagatgctatttgtgggggtttttctctcattatttggatggaatctctttggtcaaatgcacatttacagagagacactataaacaagtacacaaatttttcaatttttacatatttttaaattacttatcttctatccaaggaggtctacagagaaattaaagtctgccttatttgttacatttgggtataatgacaacagccaatttatagtgcaataaaatgtaattaattcaagtccttattatagactatttgaagcacaacctaatggaaaattgtagagaccttgctttaacattatctccagttaattaagtgttcatgtggtgcttggaaactgttgttttcctgaacatctaaagtgtgtagactgcattcttgctattattttattcttgtaatgtgaccttttcactgtgcaaagggagatttctagccaggcattgactattacaatttcattttggtggagtttagttttaggttttattgtatataaaatcctgcactgaatctgtgtctcctctgttacctacttttgccagtgaaatttaagttttaaaatactttcagaatgtatttttactactgcaagtttttggtctttaaaatgtcaagtagcatctctctctttctctctgtctctttctgtttctctctccagttttttttttttttttaatttccatatgggctaaagaatccaaatattttaaaaatctgtctctcttttcttctctcataaagtgaattattccttttttttgttttatgtaagtgtatatattcttagtttttcttgaaatcattgtaatgttaactttgttgtttcaaatatcttggtgattgcttcattatctcttcaacaaaaaaaacctttaattttgccattgaaactgtagaactatgccatgcttttattagaagcagtgctctgtgttaacaacaagaatggtgtaattagaattgggatgtggatatttactgtatgacaacacatttacagttctgtaatgcaaggatgcagttt

SEQ ID NO: 7117 - DNA, 911 bp, Homo sapiens
atggcgggacacctggcttcggatttcgccttctcgccccctccaggtggtggaggtgatgggccaggggggccggagccgggctgggttgatcctcggacctggctaagcttccaaggccctcctggagggccaggaatcgggccgggggttgggccaggctctgaggtgtgggggattcccccatgccccccgccgtatgagttctgtggggggatggcgtactgtgggccccaggttggagtggggctagtgccccaaggcggcttggagacctctcagcctgagggcgaagcaggaggtggagagcaactccgatggggcctccccggagccctgcaccgtcacccctggtgccgtgaagctggagaaggagaagctggagcaaaacccggaggagtcccaggacatcaaagctctgcagaaagaactcgagcaatttgccaagctcctgaagcagaagaggatcaccctgggatatacacaggccgatgtggggctcaccctgggggttctatttgggaaggtattcagccaaacgaccatctgccgctttgaggctctgcagcttagcttcaagaacatgtgtaagctgcggcccttgctgcagaagtgggtggaggaagctgacaacaatgaaaatcttcaggagatatgcaaagcagaaaccctcgtgcaggcccgaaagagaaagcgaaccagtatcgagaaccgagtgagaggcaacctggagaatttgttcctgcagtgcccgaaacccacactgcagcagatcagccacatcgcccagcagcttgggctcgagaaggatgtggtccgagtgtggttctgtaaccggcgccagaagggcaagcgatcaagcagcgactatgcacaacgagaggattttgaggctgctgggtctcctttct

SEQ ID NO: 7118 - DNA, 800 bp, Homo sapiens
gaagctctttgcggtggcgttggtgctgtttgcggatgctgatgcagtttctgcaggactgtaaactggattcctggaacctttgatattcctggctgtgtatagtgcctgttggtggactgtactgatactcaactagagtgtgaagggactggattcctgcccctgagacacaatgcaagctgtagtgcccttgaacaagatgacagccatctcaccagaacctcaaactctggcctcgactgaacaaaatgaggtcccaagagtggttacttctggggaacaagaagctattttaagaggaaatgctgctgatgcagagtctttcagacagaggtttaggtggttttgttactcagaagtagctggacccaggaaagctctgagtcaactctgggagctctgcaatcagtggctgagaccagacattcacacgaaagaacagattttagagcttctggtgtttgagcagttcctgaccattttgcctggggagatcaggatttgggtaaagtcacaacatcctgagagtagtgaggaagtggtgaccctaatagaagatttgacccagatgcttgaagaaaaaggtgagatttatagatggagggaggaagcgggagacattgcctcaaagtccgaaagtaaattcctcaaaagaaggcaatttactgctaaagaggagtctgaggttagaagttgggactgggtttgaatcagccctgccatttactgtgtgattttgggcaagctgtgtaaactctcagaatgtaaatatttttatctgttaaaaagggatttta

SEQ ID NO: 7119 - DNA, 3170 bp, Homo sapiens
aggaggagactcaggcaggccgcgctccagcctcaccaggctccccggctcgccgtggctctctgagcccccttttcagggaccccagtcgctggaacatttgcccagactcgtaccaaacttttccgccctgggctcgggatcctggactccggggcctccccgtcctcccctttcccgggttccagctccggcctctggactaggaaccgacagcccccctccccgcgtccctccctctctctccagccgttttggggaggggctctccacgctccggatagttcccgagggtcatccgcgccgcactcgcctttccgtttcgccttcacctggatataatttccgagcgaagctgcccccaggatgaccacgctggccggcgctgtgcccaggatgatgcggccgggcccggggcagaactacccgcgtagcgggttcccgctggaagtgtccactcccctcggccagggccgcgtcaaccagctcggcggtgtttttatcaacggcaggccgctgcccaaccacatccgccacaagatcgtggagatggcccaccacggcatccggccctgcgtcatctcgcgccagctgcgcgtgtcccacggctgcgtctccaagatcctgtgcaggtaccaggagactggctccatacgtcctggtgccatcggcggcagcaagcccaagcaggtgacaacgcctgacgtggagaagaaaattgaggaatacaaaagagagaacccgggcatgttcagctgggaaatccgagacaaattactcaaggacgcggtctgtgatcgaaacaccgtgccgtcagtgagttccatcagccgcatcctgagaagtaaattcgggaaaggtgaagaggaggaggccgacttggagaggaaggaggcagaggaaagcgagaagaaggccaaacacagcatcgacggcatcctgagcgagcgagcctcagcaccccaatcagatgaaggctctgatattgactctgaaccagatttaccactaaagaggaaacagcgcagaagccgaaccaccttcacagcagaacagctggaggaactggagcgtgcttttgagagaactcattaccctgacatttatactagggaggaactggcccagagggcgaagctcaccgaggcccgagtacaggtctggtttagcaaccgccgtgcaagatggaggaagcaagctggggccaatcaactgatggctttcaaccatctcattcccggggggttccctcccactgccatgccgaccttgccaacgtaccagctgtcggagacctcttaccagcccacatctattccacaagctgtgtcagatcccagcagcaccgttcacagacctcaaccgcttcctccaagcactgtacaccaaagcacgattccttccaacccagacagcagctctgcctactgcctccccagcaccaggcatggattttccagctatacagacagctttgtgcctccgtcggggccctccaaccccatgaaccccaccattggcaatggcctctcacctcaggtaatgggactcctgaccaaccacggtggggtacctcatcagccccagactgattacgcgctctcccctctcaccgggggtctggaacctaccaccacggtgtcggccagctgcagtcagagactagaccatatgaagagcttggacagtctgccaacatctcagtcctactgtccacccacctatagcaccacaggctacagtatggaccctgtcacaggctaccaatatgggcagtatggacaaagtgcctttcattatctcaagccagatatcgcttggtttcaaatccttttgaacacgttcgacaaaagcagtggagaagaggaagacctggagcaataaaagacaaatgcaacattttaaggcaatggtttcacatggttacatatcaaaacatcccaattctttagtgctgatcatcgaggagctagaacattccatttgcttgtgtgcgtgcgtgcgtgtgtgtgtgtgtgtgtgtattgagatttacccagactggtttgggcaagcagactgttctaaaatataatagaataccctaaagtataacatgtcgatgttcgatgctgatacttctacaactttaaaactgctcatttcatgaagcaagaatggaggaatccttgactcttacacactggaaattgaaataaagataaatgcaaccatttttaggaagctagactagctgtaaaggacctcctaaataaattatttgttactgtatcctcatttgtaatctagttgtcaataaatggcccggacatgtcttgctaacaggatatgggctaccaggaagaaggacttgtttccctttcctgtgtggggagaggtgtgtgacgtttttccagttcacatttatttggtagcccacctgggttggaggaagggcacggtggagagaaagtgacatgcattcacatatctgcttatcagtgtgcaatactgtgtacctcatggatgctttggcaatgcccaaggcgatataagcaaaatcagaagtatatttttgcaggtgcttttattttcacagcccataattcatagtgatagagtgcagtgatgtttgccatttgctggacaaccaacacccgggttgctcctttgattagagaccagatcagataattatgcttttaaactgattacgtttacattcttctcttttctatgaaaggcagggcaagaacagaagtgttcacatggctctcatgtacttttaaattatacaatgatatccaatattaaaagattataggaactgaggtttacatacgtttgtgtggtgacattttagaatgtcaataaatttgctttttgagatgttgagaggaacaagaaggtggaaggcagtgttatttatttctttctattcttggaaccacgaatgaggtaggcacaaatacattccttttagagttaagaactatgacgtagcgagttagtgagactagacatagtaccgaatttagttcatgcattggtcttagagggtgatggaacaagagaagtactatctttgtgttgcagcctcaaccaacaacaatgtgttgtaaaaatgtctttcatgtaaaaagtgcagtaaatatttactatttataatgaataaacagttatgaaaactt

SEQ ID NO: 7120 - DNA, 5627 bp, Homo sapiens
ctgcgggcggcgggcggcgggcgcaccatgccctccttcgacgaggcgctgcagcgggtgggcgagttcgggcgcttccagaggcgcgtgtttttgctgctgtgcctgacgggcgtcaccttcgccttcctcttcgtcggcgtggtcttcctgggcacgcagcccgaccactactggtgccgcgggccaagtgccgcggcgctggccgagcgctgcggctggagcccggaggaggagtggaaccgcacggcgcccgcctcccgcggcccagagccccccgagcgccgcggccgctgccagcgctacctcctggaggcggccaacgacagcgcctccgccactagcgctctcagctgcgcggacccactcgccgccttccccaaccgctcggctccccttgtgccgtgccgcggcggctggcgctacgcccaggcccactccaccatcgtcagcgagtttgaccttgtctgtgtcaatgcgtggatgctggacctcacccaagccatcctgaacctcggcttcctgactggagcattcaccttaggctatgcagcagacaggtatggcaggatcgtcatttacttgctatcctgccttggtgttggcgtcactggggttgtggtggcctttgcaccaaacttccctgtgtttgtgatcttccgcttcctgcaaggtgtatttggaaaggggacgtggatgacttgctacgtgattgtgacagaaatagtaggttcgaaacaaaggaggattgtgggaatcgtgattcaaatgttctttacccttggaatcataattctccctggaattgcctacttcatccccaactggcaaggaatccagttagccatcacgctgcccagctttctcttcctcctttattactgggtggtccctgagtctccccgttggctgattactcggaagaaaggagataaagcattacagatcctgagacgcattgctaagtgcaatgggaaatacctctcatcaaattactcagagatcactgttacagatgaggaagttagtaatccatcctttttagatctggtgagaactccccaaatgaggaaatgcacacttattcttatgtttgcttggttcacaagcgcagtggtgtatcaaggacttgtcatgcgcctgggaattatagggggcaacctctatatagactttttcatctcgggcgtggtggaactgccaggagctctcttgatcttactaaccattgagcgccttggacgacgcctcccctttgcggcaagcaatatagtggcaggggtggcatgccttgtcactgcgttcttaccagaagcaggaatagcatggttgaggaccacagtggctacattgggaagactagggataaccatggcctttgaaattgtttatttggtaaattcagaattgtacccaacaacattacgaaatttcggagtttcgctctgttcaggtctgtgtgattttgggggaatcatagccccatttctgctctttcggctagcagccgtgtggctagaactacctctgatcatctttggtatcctggcatccatctgtggtggccttgtgatgcttttgcctgaaaccaagggtattgccttgccagagacagtggatgatgtagaaaaacttggcagtccacattcctgtaaatgtggcaggaataagaaaaccccagtttcccgctctcacctttgaggcccccgacaaagacagaaagaaggagctatccaggagctgatcctccttgcaaagctgtgccttgcagagatgcacgtgtgcatttcagctacatcatgccgcgctgttgtaatactgtataaagacctcaatctatccagagtatttttatataatgttggatgagttaggatttgtaatgctgttgaagtttctgggaacacataatatgtagccagtttaacaaagaagctgtcaggtgcacagcccttcctgggtttttttcttgtgttccctgtggtctctgacccattaggctaaagagagacaagagaagcccccaacctgattctcatgacagctccatcaagaatgtgggatgtgccgaccaaggatttgagaaagttgtacagaaatgtgttcatcaaatctggtcaagggactaagctcctagctgaccattcattctgaagattgcatggaggatgaacatctgggaatcctgttaatgagaaggctgaatcacaggcacctgggccaaagggtgtgagcattcatgttctctgctcaccttggtttccgcacaccttcgcaatgtgaacaggtcaggagtccctcccgtccacctcctctgtaacagctggggttccaggcatggtttaggccctgttccagcaataagaaccaatctgctgtacaatctgaggacttggctctgttatttacaaaatgatgctgtggttctgagattatttgggacatttttggctctcctttagtggacacctagagccacagattcccttctttactaaacaaatcccatggattctgatttctgggtcttaggattttaaaagtgaagggatatttttcttatatttgtgagttcagttccgatggtgcccgtggtcaaaagcgaaaaacatggacaattcctattcattcttagcactttgacatgtcttggggaaaagcttacattttaatttaaaagaaagatcaattatatccatgcttaacaggatcagcaggagctttataaatgactttacagagactaataagggatttgatctttctttttttgttatcgaggcttttgaaatgtggaacttgtgtgttctgctttatatgttatattcaatatcttttcagatgcagtctatattttatgctgagttttaaaaatgaaatactttatgcaaacaggcaaaattggtaccaaagggaaacattaaccatgaggaagagcatttttctaaggagaacaggtgacaatatacacatgtgcgctaatcgtaaaatgagcatcttagtctttaaaacacatcagaattgaatacgaataatctatttgtcgatgaaataaacacaactctttgaggatttgagactacattcaccctttattcacagtcacttgcagttttgcttttctctgcatttctctgctgtaagatgactgttgcattgttgaattgtattttgagtggatatttttgtttggtaacaattaaaattttaaatcgtaaaaaatgtacatttgccctttctcttccttctaaacatgtgtctctcccacaggtcattctcctgtgacacgtgtactgcagagtgtttcaaaaccgggcaggcaattagcaatgggaaataagtggtccaccttcaatatttgcttgttgttcatttacatgctcttggcaccaatcctagactcacgtgtgccccagaataacattcagactctcagctggtcttgtgttacacatccatggaccggttcactccatcatatacagctctctgctccgtgtcccctgggctcaagtcaagcagtcggtgacagatttcattcccaataacagaatcggtttgcatgactccccatacatgttgcagctttgaaaacattcatctcagagttaggtataaagacataaaaatgtgtgtcaagccctcgttagctgatgaggtaaatgcatggacaacttcctaggacttctcggctctgccctctgtgaccttgcagcctgctcaggtctttgtgctctgttccttatcaaaaacagcacaaccccctcaatctgcccatttaaaaattggtggagtgaacaaagagcatgaaaatgttgaagaccacaaccaaaatttactcaaatcaaagttaagtacagagtttatttttaacaaatgtcatagctatgtcaccttactacagaatccagcagtcagaaaataacacaaaaaatgccgaggtttggcgtagctggtagctggggacagtgtcttcgtttgattactgccagttatttccagcatgctaaatccctacccacgttccagcctctaggtgagtcagtgcgtcactctgtctcccgtccaattaattatttctcatcactccctcaatccaagtaacaaaccttgaaacacgaacatagacaccaggcttattggggcgtgcacagccaagaccccaagaagtgactccttgtaaaatgtatttgtccttctcaaagcaaaccagaggccctccactgtcaccctaaatagaggtagggaaaaattcatgtgagggttaggctgccagccttttattgtggcatccatctattgtccatatgtatattttcccagtaattgaaattggaaaggaacttatgggcatattactggagcatctgcagtgcttaagtacttagcaaaatctattcagcgaaaccacaccacttagtttctcccaggggtaaaaaaaacccttgtgaatcctgcacacatcccttcctgtgttggtgtttcctttagactggcctagcctgggcatcactgtaaagtatgtgcagttggtctctgtcctgtaccctctacctccttccctgtcggaaaagtcaccactttagtccctggccaccagcacaccccaggagggtgagtggcctgaggtagttacggcacttaaaactcccttgctaccgatctggaactcaagccccaagacatccccttagatgatctgaatacgcattcagggacagatctaggcagtttctaaacaacacttagactggggtctaacgttgacaaatccttctagaatttgcctctttgggactgaagtctaaggggctgagaccaagaagggagagcacaagactaactttggtctcttgaccttttcttaccttgcaactgtcagtgcctccagccaaatgcctagcacagagctcagtggatttgattcttccattcagatactcatagcgattgcacactttattctcaatcacaagaagctggggcttccttgagaaggccagccccaaaggtacctgtgtttaaaagatgaaagaaatggttgctgaacccaaaacatgtttaggaggaaaaccagaagaacagagcagtggcactggacctcctgtctgtccgtgaggctgcagaacacaaggcagctcccaatgccgctggactctctgaccttggagagtgtaaacatcatatatgattctgtgttcctgagatctgggtttaacgatctgggctttgtcatggtgttttacgttcgttgttgtttgtgtactttttgcttttcttttgaaagtatgaaaatgatttttacaatgtaaagagagtctgagaaatgcaattgctattctttttatatactttttcagattttttatatgcttctttactacttacatcataatgcacaattttatatactgattttttcaatcaatgtatatcatgagtttttaaaataatgctacaatcttcataactaatattttaatggggagtgactgcttaattggcatgaggtttccttttgagatgaggaaaatgttctgaaaatatggtgatggttgcacaccattgtgaatgtactgaatgccattcagtggtaccctgcaaaataattaaaatcctaactctta

SEQ ID NO: 7121 - DNA, 5537 bp, Homo sapiens
ccgccaccggagctcccggggcctccgcggggagcgcgtcccccgcatccgcccgacccccggggctggcacgtgctgcgcccggtccgctgagggggcggaggccccgatctccccgaccccccttctctgcttagaggaggaggagcagcggcagcggcagcaggaggcgacagctgccagccgaggaggcgcggcggagaggggactgcggtcagctgcgtccacttggggctgtgcggcggtcccgcgcccggcgatgttcccgggcactccctgagtagcggcagcttatcccccgcccgctagcccgccctggtccccggctcgctcgctggctggcgcggccccggccccgctctgcgtcggccccgccgcggtggaggcgcgcgagggggacgcggccggggatgagcggattgcgggtgaactcgccgcccgggggccccgcgaagccgtgagccgctgcttttctccgagtcgccgccctgcccttggatttgagatcatgtccatccacatcgtggcgctggggaacgagggggacacattccaccaggacaaccggccgtcggggcttatccgcacttacctggggagaagccctctggtctccggggacgagagcagcttgttgctgaacgcggccagcacggtcgcgcgtccggtgttcaccgagtatcaggccagtgcgtttgggaatgtcaagctggtggtccacgactgtcccgtctgggacatatttgacagtgattggtacacttctcgaaatctaattgggggcgctgacatcattgtgatcaaatacaacgttaatgacaagttttcattccatgaagtaaaggataattatattccagtgataaaaagagcattaaattcagttccagtaattattgctgctgttggtaccagacaaaatgaagagttaccttgtacatgcccactatgtacctcagacagagggagctgtgttagtacaactgaagggatccaacttgcaaaagaactaggagcgacctatcttgaactccacagccttgatgacttctacataggaaagtattttggaggagtgttggagtattttatgattcaagccttaaatcagaagacaagtgaaaaaatgaagaaaagaaaaatgagcaactcctttcatggaattagaccacctcaacttgaacaaccagaaaaaatgcctgtcttaaaggctgaagcgtcacattataactctgacttaaataacttgctgttctgctgccagtgtgtggacgtggtattttacaaccccaatttaaagaaagttgtagaggcccacaagatcgttctctgcgctgtaagccatgttttcatgctgcttttcaatgtgaagagtcccactgacattcaggattccagtatcatccgaactacccaggatctttttgctataaacagagatactgcatttccaggtgctagccatgaatcttcaggcaacccaccattacgagtcattgttaaagacgccctcttctgttcttgtttatcagacatccttcgcttcatttattcaggtgcttttcagtgggaagaattggaagaagatatcaggaagaagttgaaagattctggggatgtttcaaatgtaatcgagaaagttaaatgcattttaaaaacaccaggaaagattaattgcctaaggaattgcaaaacctatcaagccagaaaacctttgtggttttataacacttccctcaagtttttccttaataagccgatgcttgccgatgttgtcttcgaaattcaaggtacgacagtgccagcccacagggccatcctggtggcccgttgtgaagtgatggcagccatgtttaatggtaattacatggaagcaaagagtgtcctgattcccgtttatggtgtttccaaagagactttcttgtcatttttagaatacctgtacacagactcctgctgcccagctggcatattccaggccatgtgtctcctgatctgtgccgagatgtaccaagtgtccagactgcagcacatctgtgagctgttcatcattacccagctgcagagcatgccaagcagggaactggcatccatgaaccttgatatagttgacctgcttaaaaaggccaagtttcaccactctgattgcctttcaacctggctacttcatttcattgctactaactacctcatcttcagtcaaaagcctgaatttcaggatctttcagtggaagaacgcagttttgttgaaaagcacagatggccgtcgaatatgtacttgaagcagcttgcggaatacaggaagtatattcactcccggaaatgtcgttgcttagtaatgtaacctggagcttttatacactacatttcttttttattattatgaagaatgggatacctccaggttccagtaaaattcttctgaccgaaaccaatgtgggtgttagaaaaattaccatatagcttaatatgtttattagttctctttggaaaaaaactaccactgtggtcttaaaagggaacaaaatataccataggctaaaactaaggctttcactctagaatgcaaagctgttttgcagctgttttcccttaaagatgtcctgttgctttagtgatatttagacccctctcagttaagaaatgcttagattaaaaaaaaaaaattacgtaggattaatacagaaatttaatcatgtctgattaattgctctattaaaataaggggcatttaaagacccagcataaccatttgtataatgagaaatctaggggaaaaccaatcagtccaacatgagattttaggaatagaaatttgccggccatttggaaagtgaaatgccacttagttctcaattgatgacagtgtttgaatcatcataaaaaaaatacctgcttttcatctggacaacccaattgagccactttatctccttttggcaatctgagtaggcggggaacctaggcagggctggctttcttagcgtgtaacttgtgtagcagcacagggcccacacttagaaggaccccacacttggttcaaggctctgctatagcggaaattcttaataatgtttgaagaagggccccatgatttcattttgtgctgagccctcaaaattatgtctgtttcgtggtgggaaatatcctatgttttcttgctcaaacacctttctctctgaaagcagaaaaaggcactgatataaagggaagagaaggaggctcaccggagggaagagaacatagtgaagattcccgcctttggggaggtctggaccacccagggcctccactgccaccttggctggcaagggagaaatgtgttgtgttgtcttagctttaaaacagtcacagttcttgctctatcatagatgaacaaatactttcttgatcattctgtaagaccaggaggttggtaagagtgactaaccagcctaactttaatacacatgtataaagatgttcacagagaaagatgctctgtagagaatttgctaccgaagttggctcaagaatttgtttttagtgttatttaccaagattaggacgtcagtggcttaaattctttgaattcttttcaaggactgcaagattatttgataaagagtagcatgaatcttgtgctctaatattacacagtaagttcaaagaaaggatgtaagtcaaagacttgttacatagagggaaaatggactgggatagaggacagactgatagtttctttctttcatatcacatgtatagagaaataattatatcagaaactcacaaacctagacatggaaaaacagattactgtctattgtcagcatcattttcatctgtaagtcactactggaatatatttttcttttaatttccagtgactttagaatacacacagtttttccgacttttcaaaaatttgattaaatggttttatagtataatattgggaccccataccgttagcccttgtatgtataccaacactgccaaagtaaaacattaggtcaggcatggtggctcaggcctgtaatcccagcattttgggaggctgaggcaagtggataacttgaggtcatgagttcgaaaccagcctggccaaaacagtgaaaccccgtctctactaaaaatacaaaattagccagatgtggtggcgcacacctgtaatcccagctactcaggaagctgaggcaggaaaatcgcttgaacctgggaggtggaagttgcagtgagccgagatcgcaccactgcactccagcctgggtgacaagagcgaaactccatctcaaaaaaaaaaaaaaaaccaaagtgaaacactaaaaattccctatagatatattccaggaaatattttaattgggctgattttaattaggctgtatcattgatgattactggaatcgattttatgtcttttgtattttaatcacttgagttaatcaaccactggcaaatcccatttgacaaagattagcattgtaaaaaacagatactgtggtagatttctagaaattcattcacatttaagacttctaaaatggaataatagccttttgtttttcatgagcatattcgcacccctatatgaattacagcatttaaagttcaaaatcagtaacttttaatctaggaaattgaaaaatattaagttgcaaagcaaaaaaaggtattttcttgaaaatactatttaatgtttaactagactataggtagttccttaaggttgtttgacctgaagtggagttgggtttggaagctggtgcccagttggtgtggagtgtgtagttttgttatgaaagttctctaccacctacctgtgtgagtgacaccaacatccagatgtcacagctctccagagctagtcagaagagaaatcaaattagtgtttaaacccatttgcatattgacttgtcagtacctttaactcaatttaatataacaagaaatcgtaaaatacttataacctatcttagagaaatgagtgctggttttgagagttgttttttaactgaaagattatttctagatgggtagtgctttgtgctggtttctgcttccatatatttcccagtcattttaattagagaagatactctatggtagaactaaggcctttcctttcttggccaaagtctttaccctatttaaccctttgtatatttctgactgctcactgttcatattataggggaccagatttgtaatatagaattctccataacatgaatgaaattaattctgtccaagccagcatggtggcttcatattaagtagtaacagaagtctgaacaattggataaatttgacttccaagacagctaaacttttcaactgcaattttaaaaactacactacactgttatagttaatctgacaaaaatgtcctcaaagagtactttattttatttaaagcatctgtttaattcaacctttaataattttgcaaagaagggtatgtgtgtattttaatatagcctgacctgaatttatatgtttttagctttagtatttaactttttgtaacaaataaaccttttttaaaacaagtttaa

SEQ ID NO: 7122 - DNA, 3028 bp, Homo sapiens
atgacgccgtctctcagcgctgaggaaaacagaatgtataataagatgtggcatcagacccaagaagccctcggtgctttactcgataaagagcctcagaagatgattgaaccacaaagaaatcaggttttcatctttcaaacattagccaccttctacgtaaagtatgtgcagatctttagaaacctagagaatgtctacgaccagttcgtccacccccagaaacgaatactgatcaggaaagtcctggacggggtgatgggccgcatcctggagctgaagaacgagatggtggagctggaactcacggagttccattatttcgatgatatcctgcaggatctcaagctggccccccaacaattagatattcccatacccaagtattttttgaaggagaagttggaagtaataaaaggaagagagaaaattcttgctcaaatattagcggacagcggaatagatacatctgacatgaaataccctgtaaagagtatccctttcgatgaggctgttaaattaatccagattgctgagagggcacggcaaggtcgcctaagggctttattcatgaagcaaatctatctgcaagaatatagagcaaagcaatccaagatgcttggcaagaaagtgacagatacctgggctgctgcactccgcattcagaaggtttggcgacgtttccatcaacgtaaggaaactgaaaaactgagagaagaggagatgatcttcctgggtatgaatccacctcctctctttaatgaagtcagtgctacagtaatccaggctgaaaaggtggaccgcctgcggaatgaggtgcagataaagcatgaagaggactacagggaagccctggttaccatcaagaatgacctaaagttgatagaaggcgtggatatcaaggagaaccttcaagaccagatccggcattggttcatcgaatgcagaaatttaaccgggacatttcctgactaccctgacgttgaagaaggagggtcagctattattttttctgacaagaccatacaacaggttattgaggatatcatagcaaaccaagaggaagaagaaaaaaacaaaaagaagaagaagaaaaaggaaaaacaacccaagaaagccaaaaaacaaaagaaaggaacaaaggagaaaaataaggaagaagacgaaaaatggaaaatgtcaccaagtctttttcttcctgcaatgaaggaaggatgtaacgcatacaaagaaatctggatgaaaaaagatgagtcttggaatttctctcaggactatgatccagaactgatcaaagaggagaaacgaaaagaattacagtcagagatcaggatacaggttgatgagttgatgagacaggaacttaaaaacttaaagctagctgtggacagagaaagggagcgcccagtgaaagcaggaaagaaaaaggacaagaagaaaggaaagaaaggcaaaaagaaagagaagaaggcaaagaaggataaagatctgacagctgacaggaccatcgagtctctgtataaggaactggtggaagaaggattactgatccaggctctgaaagtcaacctctctgattacattggtgagtacagctacctggggactactcttcgccaggtgtccatagaacccatgccctccctcctggatgtcagacagctcatcacattgtacggaatctggccattaggttctgcagcagtgcatgagaaagctcctttggtgaaatcgctactgttagccgggccgtctggggtagggaagaaaatgctggtccatgccatctgcaccgaaacgggagccaacctcttcaacttgtcctcctctaacattgctgggaaataccctggcaaaaatggcctccaaatgatgctgcatgcagtcttcaaggtggctcgacagctccagccctccgtggtgtggattgaagacacagaaaaaaccttctacaaaaaagttcccaacgcagaaaagatgaatgaacctaaacgcctgaaaaaacaccttccccaaatcctgaaactcctgaaaccagatgaccggattctgattgtggggaccacacggcgtcccttcgatgctgaactccaatctttctgcaaagtttaccagaaaattattttggtgcccagaccagactatgcttccagatacgttctgtggaagcaaatcattgaacgcaatggaggagtcctcaccagtgccttgaatgtcagctgcctggcgaaggtcactgacggcttcacccaaggacatatagtcgaagtggttaaaggcgtgctcacagatcagagaatccggcggcaaattcataaacctctcactgcagttgagtttattacggcgataaccagcatgaatccagtgtacaaagaggaagaagagagctttaagaactggtatgccaaaactcctctgggtaaaaaacgtgccttggcgataacaggaggcagcacagaaaaggcaaaggacaaagggaaaaggaaataaaagaaagagaaaaaggcaaaaaagaaaaagtaatgcctttctgaagaaccatgcttgagtctctctgggatggagaggaccccaactcgccaaagaaaagattcaccattgcccgcctgaagaagccctcaggggaaggaacttagcagtgtgcaggtgagctgatgccgcaaacccgctaaccactgcatgtgctgttatgcctttcccaggctggacacctagctgggtgttcatcataactttccacagctttaatccacgccaagtttgtatataactgaaattcactcttgacaccctccacagtctttccaagttggactcttcctctcatcagtactagttgtcaaatttaaaatgtgacagttaaagaatattctagtttgacaattagtaagcaatgagtatatcatcagtacactagctttttattaatccatgtacactgtatagtatcttgcatctattttaataaattaattctttgctctagtaatagattttatataatgaaataaaggtgttgtccttg

SEQ ID NO: 7123 - DNA, 1577 bp, Homo sapiens
acttcctgagccgggctggctgggtgggaacaggctccttgccgcctccccagcgctggccactaccacactgccgcccgcctgggcctcctttcaacctcgtggtggagccctgcggtttcccagcggagccgggcccggggctgctccctcgcgggcgaggctcacctgtcccggcccggccccctcccgcgccccaggtggttcagggcagggaggagccgcgccccgccccgcgcggtagcagccaacgccggccccaggcgggtgcgctgggagcctgggccgggagccgggtgagggcgccgagaggctcggtgggcgcgggcggcgagatatgccacacttctgcctgctgttggcaaccctcctggactaggctgctcttgttaatcacatggatgttgctgattactctgagtgcaaaccttttcactgttccagagaggagcctgacaaccacattctccttctcaagatataagagttcggaccgcccagcacacaaggtcagcatgctgctcctctgtcacgctctcgctatagctgttgtccagatcgttatcttctcagaaagctgggcatttgccaagaacatcaacttctataatgtgaggcctcctctcgaccctacaccatttccaaatagcttcaagtgctttacttgtgaaaacgcaggggataattataactgcaatcgatgggcagaagacaaatggtgtccacaaaatacacagtactgtttgacagttcatcacttcaccagccacggaagaagcacatccatcaccaaaaagtgtgcctccagaagtgaatgtcattttgtcggttgccaccacagccgagattctgaacatacggagtgtaggtcttgctgtgaaggaatgatctgcaatgtagaattacccaccaatcacactaatgcagtgtttgccgtaatgcacgctcagagaacatctggcagcagtgcccccacactctacctaccagtgcttgcctgggtctttgtgcttccattgctgtgatgccaccattcctaggagaggcagagaccagcctctaaagcacaagccaaaaactgtgtgaacggtgaactttggagtgaagatcaatcttgcacttggtgaagagtgcacattggacctcaaggcgaaagccagtggtttgcttggataaaatgttcccgcatgaggccacaggactgaggatgggaatttggcagggcctgagaagatggtctgacttccaggcttcctggtcaaagagagctacgtttgggcagttctgcagagaggatcctggcaactagtcccacctgactaggcctttagctgaaaggatttcttgacctccttgactgcctcagaggctgccaggtcaaaccctcttgtttatgtgattagctcagagcatctctatgaaatctaacccttcccctcatgagaaagcagttttccccaccaacagcatagtcaatgagaaaggcaactgtacgaagaaaacttccagtggaactaatatgaaatctatttgcaaattatggggggaaataaagcttttaaattatacaatgtaaa

SEQ ID NO: 7124 - DNA, 1109 bp, Homo sapiens
accctcccctaactccaggccagactctaaaggggagatctggatggcatctacttcgtatgactattgcagagtgcccatggaagacggggataagcgctgtaagcttctgctggggataggaattctggtgctcctgatcatcgtgattctgggggtgcccttgattatcttcaccatcaaggccaacagcgaggcctgccgggacggccttcgggcagtgatggagtgtcgcaatgtcacccatctcctgcaacaagagctgaccgaggcccagaagggctttcaggatgtggaggcccaggccgccacctgcaaccacactgtgatggccctaatggcttccctggatgcagagaaggcccaaggacaaaagaaagtggaggagcttgagggagagatcactacattaaaccataagcttcaggacgcgtctgcagaggtggagcgactgagaagagaaaaccaggtcttaagcgtgagaatcgcggacaagaagtactaccccagctcccacttcccctccactcctcagagccggcttcagacccaactaacgacactgaagattgagatggacgaagccaaggcacaggggacccagatgggggccgagaacggggcgctgacaggtgcgttggggtgtaagggagtgggcagggatagaagtgggaggagcctaggtgaatcctagttatccaaacaagcacagttgcaaacgtaatgcaaataacacggatataaacgcaaaaacttatgaaaagaatgcaaacaacatgcagaggccatgcaaatgtcacaaaaacaaggcaaatgccacaaaacatgcaaactccttgtaaacgactcacgaaagcaatgcaaacctatgaaaagctatgcaaatggcacgtggaagccatgcaatggtacacactaatttaattcaaataaaggaaagcgtgcaaacggcatgcagactatcaacttggattccggcgtgcgtggggcgggtgggcgcgggagtctccagcctgacccggctccctgcgcccccagaggccctggcgcgctgggaggcggcggccacggagtctacgcggcggctggacgaggctctgcggcgcgca

SEQ ID NO: 7125 - DNA, 291 bp, Homo sapiens; identical to SEQ ID NO: 6525

SEQ ID NO: 7126 - DNA, 791 bp, Homo sapiens
gatgcctgatctcatcaatctagcgggagagacaggataacctgtccgagagtatagcgccactatgactccgccggaaaaattactttaaaaatcgccaaaaattacttggagcaaagggcagtcggcggagcttcgccaaggctggcgcagtcggttttgacctgtagcagagaaccaattctggagaacagcctcacttctttgattgaatacttacataatgcattggaacatgacatgagattaaggtttaataatgatagaatgaagaccacaataaaagagacctctacttagctcagcaattcttacctttcttacctatttgatgaagatgtcttttgaaaggtgtactgcaaggaacaaaatgtttgtaaattctccttttaccaaggtaaagatcaaattttataaatttacttgtttgtttatacaaggaaaaataacttcatatattgaatatattcaaaagtttaagcatttagttgtattgccctgttaagttggcatagcaaataaatgcttttcttttcctcattttattctttgtgtttcctaacctatagcactgtgctgggcacagaatggacttcagttaagtttttgatgtagaaatgttttattattctacttaaaatctccttaaaaataattatgcatattacatcaatgttataatgtttaaacatagatttttttacatgcattctttttttcctgaaagaaaatattttttatattctttaggcgcgaatgtgtgtttaaaaaaaataaaaccttggagtaaa

SEQ ID NO: 7127 - DNA, 562 bp, Homo sapiens
acacgcgctcgcaggctgacggaggttggcggtggggcggccgctcaggaatctttgtgacattctctctcagcattctttatcccctgtttgctgaagacttcgacaaaagctggtcttagctgttggcattctcctgagaaaaggatagcttcagaaatcagaaaaacatttgggaggtgtctagcccagtggaccttctgaagagcaatgctaagaagacgtttggtttaaagaattaaaaggaagaacaacttaagagcttcttcaaagtttcccgcatgaaaattacttaaacgttgcacacaacgtttcacaaaatcttttgtgaaagaagaaaaggaaattcagtgtgtgagtctcagcaggagttaagctaatgcagcttaaaataatgccgaaaaagaagcgcttatctgcgggcagagtgcccctgattctcttcctgtgccagatgattagtgcactggaagtacctcttgatccaaaacttcttgaagacttggtacagcctccaaccatcacccaacagtctccaaaagattacattattgaccctcgg

SEQ ID NO: 7128 - DNA, 996 bp, Homo sapiens
agacaacagacacgcgaggtcaggaagaagccgcttataaattaccgcttccttcgcgccgccgccaacgccgagccccgaggaccgcaagcccagaggacaagctgcgccaagagggagtgctggagctgttcacccagcgggtcagagagcgagccgggcaggccagcccccggccggcggaaccctggcacagcctgagcagatgctgcgggcggcgccgcagccaccccagatccagaaccagaaccacagcccttctgaggagctcccaaacaaagcaaggagatggccaccaaggagaagctgcagtgtctgaaagatttccacaaggacatcctgaagccctcaccagggaagagcccaggcacgcggcctgaggacgaggctgagggaaaacctccgcagagggagaagtggtctagcaagatcgactttgtgctctctgtggctggcggcttcgtgggcttgggcaacgtctggcgcttcccgtacctctgctacaagaatggtggaggtgagcttgggccgggccacaggggagcccatccagtacaaagccgccttagagctggaggctgggaccagagcgtgggtggcctctctttccctgctttccctggcccccccccttgacctccatgaggtcagcctgccatgctcctgccaaccccacccttagagacaggggataagcccgactgagaatcagagtactgttctgcagggcctttctgtgttaccttgagcaggtccctcagcctctctggtcctccagtttgccacctccaaagaggcaggacaaggccaggcttgtgtctcccaagccccagacattcacacacctccttatctgtccgccatatctacttgcctctgactctttatctttcctttaatattcatgtttgcttttctaactttaccaaatgtactccagaaagcaaattctgttacccgctgtagatggaaaactggtatcatttgtcatgctcc

SEQ ID NO: 7129 - DNA, 2415 bp, Homo sapiens
acatgctgcccaggctgcgcgggtgattggcttggctggacctgaatgatgcggctgtgattgctgaattgtctgggcaggtttggagtctctggcaagctcccctgactgtgcatccctctggagacgaagaggagggggaggcctgtcctctctgggatccattggtcacatccccctgaggattcccgaatgcctacctccagtgtcgtcaacatggagttctgaagtccatgtggctcttcacagtgaatcaggtgttaaggaagatgcagagacgccacagcagcaacacggataacattccacctgaaagaaaccgcagccaggcgctcagctccgaggcgagtgtggatgaaggtggcgtctttgagagtctgaaggcagaggcagcctccccaccagcgctcttctcgggcttatcaggcagcctccccaccagctcgttcccctccagcctggtgctgggctcctcggctggcggcggggacgtgttcatccagatgcccgcgtccagggaggaaggagggggccggggcgaggggggcgcctaccaccaccgccagccccaccaccatttccaccatggcggccaccgcgggggctccctgctgcagcacgtgggtggggaccaccgggggcactcggaggagggaggcgacgagcagcctgggacgcccgcccccgccctgtccgagctgaaggctgtgatctgctggctccagaaaggactccccttcatcctgatcctcctggccaaactgtgctttcagcataagctcggcattgctgtgtgcatcgggatggccagcaccttcgcctatgccaactccacgcttcgagaacaggtctcactgaaggagaagaggtcagtgctggtcatcttgtggatcctggcctttctggcggggaacaccctctatgtgctttatacattcagctcccagcagctgtacaacagcctcatattcctgaagcccaacctggagatgctggacttctttgacctgctatggattgtggggatcgcagactttgttctgaagtacatcaccatcgccctcaagtgcctcatcgtggccctgcccaagatcatcctggctgtcaagtccaagggaaagttctatctggtcatcgaggagctgagccagctgttccgatcccttgtccccatccagctgtggtacaaatacatcatgggtgacgactcctccaacagctacttcctgggcggggtcctgatcgttctctacagcctctgcaagtccttcgacatctgtggacgtgtgggcggagttaggaaagccctgaagcttctctgtacctctcagaactatggagtccgagccaccgggcagcagtgcacagaagctggtgacatctgcgccatctgtcaggccgagttccgagagcctctgattctcctgtgccagatgctgttgaaggggcacaagaaattggagctggagaagattgatgaaagtgcaggtgtgtaaggaaatagaacagtctgctgggagtcagacctggaattctgattccaaactctttattactttgggaagtcactcagcctccctgtagccatctccagggtgacggaacccagtgtattacctgctggaaccaaggaaactaacaatgtaggttactagtgaataccccaatggtttctccaattatgcccatgccaccaaaacaataaaacaaaattctctaacactgcaaagagtgagccatgcctgttaacactgtaaagaatgtaacatgtgggggacacacaggggcagatgggatggtttagtttaggattttattagtgcatgccctaccctctgggggaacgtcccatctgaggttttcttctcggtggggggatttaacttctgtcctagggaaaacagtgtctgatgaggagtgtttccaacacaggctacatgaattcccctataccagtgcgaaagcagccaggagtccccgttggaaaagaacaatgccactctcttttatgtatcttggttctgcaactcatttgttgtaagtagggttaatcgagtatcaggttcacagtatcctgcccttattattttatgattcactgactcaagttccacgaagtccttagaaatggacctcttcatgtaaaatatcttgagaataataaatgtgagggaataagaaaggcaagctttggacacagatatgataggtgcatcagcttcggaagagaagaatgatgtgcagagtgttaggaagacatccgggctgctgagactcgggattagaagaaagagaggtaaataaagtgggtcctggaatcttttaggacttctgctgtaggacaaacagctgcctttggtgttttaatgtctcccaaagtacccttcagccaataaataccatctgttggtgcaa

SEQ ID NO: 7130 - DNA, 5177 bp, Homo sapiens
gatcccctcgcgggtgcaacacaccaaacaatcgagcctgcgtgctgccgaagcagggcgccgagtccatgcgaactgccatctgatccgctcttatcaatgaagcagccgatcatggcggatggcccccggtgcaagaggcgcaaacaagccaatcccaggaggaaaaacgtggtgaactatgacaatgtagtggacacaggttctgaaacagatgaggaagacaagcttcatattgctgaggatgacggtattgccaaccctctggaccaggagacgagtccagctagtgtgcccaaccatgagtcctccccacacgtgagccaagctctgttgccaagagaggaagaggaagatgaaataagggagggtggagtggaacacccctggcacaacaacgagattctacaagcctctgtagatggtccagaagaaatgaaggaagactatgacactatggggccagaagccacgatccagaccgcaattaacaatggtacagtgaagaatgcaaattgcacatcagattttgaggaatactttgccaaaagaaaactggaggaacgcgatggtcatgcagtcagcatcgaggagtaccttcagcgcagtgacacagccattatttacccagaagcccctgaggagctgtctcgccttggcacgccagaggccaatgggcaagaagaaaatgacctgccacctggaactccagatgcttttgcccaactgctgacctgcccctactgcgaccggggctacaagcgcttgacatcactgaaggagcacatcaagtaccgccacgagaagaatgaagagaacttttcctgccctctctgtagctacacgtttgcctaccgcacccagctcgagcggcatatggtgacacacaagccagggacagatcagcaccaaatgctaacccaaggagcaggtaatcgcaagttcaaatgcacagagtgtggcaaggccttcaaatataaacaccatctgaaagaacacctgcgaattcacagtggtgaaaaaccttacgagtgcccaaactgcaagaaacgtttctcccattctggttcctacagttcgcacatcagcagcaagaaatgtattggtttaatctctgtaaatggccgaatgagaaacaatatcaagacgggttcttcccctaattctgtttcttcttctcctactaattcagccattacccagttaagaaacaagttggagaatggaaaaccacttagtatgtctgaacagacaggcttacttaaaattaaaacagaaccactagacttcaatgactataaagttcttatggctacacacgggtttagtggcactagtccctttatgaatggtgggcttggagccaccagccctttaggagttcatccatctgctcagagtccaatgcagcacttaggtgtagggatggaagcccctttacttgggtttcccaccatgaatagtaatttaagtgaggtacaaaaggttctacagattgtggacaatactgtttccaggcaaaaaatggactgcaaggctgaagaaatttcaaagttgaaaggttatcacatgaaggatccatgctctcaacctgaggaacaaggagttacttctcctaatattccgcctgtcggtcttccggtagtgagtcataatggtgccactaaaagtattattgactatacgttggaaaaagtcaatgaagccaaagcttgcctccagagcttgactactgactcaaggagacagatcagtaatataaagaaagagaagctacgtactttaatagatttggtcactgatgacaaaatgattgagaaccacaacatatccactccattttcatgccagttctgtaaagaaagttttcctggccccatccctttgcatcagcatgaacgttacctttgtaagatgaatgaagagatcaaggcggtcctgcagcctcatgaaaacatagtccccaacaaagccggagtttttgttgataataaagccctcctcttgtcatctgtactttctgagaaaggaatgacaagccccatcaacccatacaaggaccacatgtctgtactcaaagcatactatgctatgaacatggagcccaactccgatgaactgctgaaaatttccattgctgtgggccttcctcaggaatttgtgaaggaatggtttgaacaacgaaaagtctaccagtactcaaattccaggtccccatccctggaaagaagctccaagccgttagctcccaacagtaaccctcccacaaaagactctttattacccaggtctcctgtaaaacctatggactccataacatcaccatctatagcagaactccacaacagtgttacgaattgtgatcctcctctcaggctaacaaaaccttcccattttaccaatattaaaccagttgaaaaattggaccactccaggagtaatactccttctcccttaaatctttcctccacatcttctaaaaactcccacagtagttcatacactccaaacagcttctcttctgaggagctccaggctgagcctttagacttgtcattaccaaaacaaatgaaagaacccaaaagtattatagccacaaagaacaaaacaaaagctagtagcatcagtttagatcataacagtgtttcttcctcatctgaaaactcagatgagcctctgaacttgacttttatcaagaaggaattttcaaattcaaataatctggacaacaaaagcactaacccagtgttcagcatgaacccatttagtgccaaacctttatacacagctcttccacctcaaagcgcatttccccctgctactttcatgccaccagtccagaccagtattcctgggctacgaccatacccaggactggatcagatgagcttcctaccacatatggcctacacctacccaactggagcagctacttttgctgatatgcagcaaaggagaaagtaccagcggaaacaaggatttcagggagaattgcttgatggagcacaagactacatgtcaggcctagatgatatgacagactccgactcctgtctgtctcgcaaaaagatcaagaagacagagagtggcatgtatgcatgtgacttatgtgacaagacattccagaaaagcagttcccttctgcgacataaatacgaacacacaggaaaaagaccacatcagtgtcagatttgtaagaaagcgtttaaacacaagcaccaccttatcgagcactcaaggcttcactcgggcgagaagccctatcagtgtgataaatgtggcaagcgcttctcacactcgggctcgtactcgcagcacatgaatcacaggtattcctactgcaagcgggaggcggaggagcgggaagcggcggagcgcgaggcgcgcgagaaagggcacttggaacccaccgagctgctgatgaaccgggcttacttgcagagcattacccctcaggggtactctgactcggaggagagggagagtatgccgagggatggcgagagcgagaaggagcacgagaaagaaggcgaggatggctacgggaagctgggcagacaggatggcgacgaggagttcgaggaggaagaggaagaaagtgaaaataaaagtatggatacggatcccgaaacgatacgagatgaagaagagactggagatcactccatggacgatagttcggaggatgggaaaatggaaaccaaatcagaccacgaggaagacaatatggaagatggcatgtaataaactactgcattttaagcttcctatttttttttccagtagtattgttacctgcttgaaaacactgctgtgttaagctgttcatgcacgtgcctgacgcttccaggaagctgtagagagggacagaaggggcggttcagccaagacagatgtagacggagttggagctgggtattgttaaaaactgcattatgcaaaaattttgtacagtgttaaggcctaaaaactgtgtggttcagagactaattcctgtgtttaatagcatttatactttaagcacaactagaaaattgtaagaattgcactctacttatgtatcactacaaactttaaaaaactatgtctaatttatattaatacattttaaaaaggtgcccgcactaccatacatcagtatttttattattattattgttattcctttttaatttaatgtgctcgcactacaatgcatcagtattatgattcctctgtactttcctttcgctattcatcaatttcccattttttttttcagcttaagtaaccacacaattttaggcctcaatttttttttttttctgtgaaggaacttgaagtgatgcatgtgtgaatttaagataccgaagtcttaaagtgacctggacgtgaaggaaaaagtaagatgagaaataaagaaagcctttgtaaggtggttttaaaagccttatatgcaaaccttttaatctgtgtttctgcaagtgccatccttgtacagtgttaagagggtaacatgggttacctttgcaccagcttcagtgttaagctcaccctgttctttgaagcacccatgtcagtattagaagaataggcagcagttccttagtttacatatgtttgtgcaattattttctgtacttttttgttcattaattttgtcagtattacaccaaactgtttttgcaacaaaaaaattttttttgcattcatttaattttaggtcaaataacattttatttatgtggctcattttatatttcctaattttatttatttcatactgtagtgtacagtattatagttcttcaatatatagatatattttagtaaaaaaggaacatgacgttgatcatttgggcaaattttacgtaaagagaagagcatttattgtgttttggaacattaattgtgagatgggatttttcaattttattattttatttttgtttttttccaattactggaaattccaaatttgggaacttttgatacgatcttgtgaaaacactgtattttcgactgaaaattccactttcttcatcttgttttttagctaaaaagagggactgttaaatacaatgtatgataccatgacaaaaatctttcctgaattgtctttgtaaaagtattattgaattttcaatttgtaatttcttttgaaaatgaccatgctcgaataaaaatgtagccaaact

SEQ ID NO: 7131 - DNA, 1612 bp, Homo sapiens
gtgggatgggtggggggtaacgggggaaactggggaagtggggaaccgaggggcaaccaggggaagatggggtgctggaggagagcttgtgggagccaaggagcaccttggacatctggagtctggcaggagtgatgacgggtggaggggctagctcgaggcagggctggtggggcctgaggccagtgaggagtgtggagtaggcgcccaggcatcgtgcagacagggcgacatcagctggggacgatgggcctgagctagggctggaaagaagggggagccaggcattcatcccggtcacttttggttacaggacgtggcagctggttggacgaggggagctggtgggcaggggtctggtgcggagagggcccacagtggacttggtgacgctgtatgccctcaccgctcagcccctggggctggcttggcagacagtacagcatccaggggagtcaagggcatggggcgagaccagactaggcgaggcgggcggggcggagtgaatgagctctcaggagggaggatggtgcaggcaggggtgaggagcgcagcgggcggcgagcgggaggcactggcctccagagcccgtggccaaggcgggcctcgcgggcggcgacggagccgggatcggtgcctcagcgttcgggctggagacgaggccaggtctccagctggggtggacgtgcccaccagctgccgaaggccaagacgccaggtccggtggacgtgacaagcaggacatgacatggtccggtgtgacggcgaggacagaggaggcgcgtccggccttcctgaacaccttaggctggtggggctgcggcaagaagcgggtctgtttctttacttcctccacggagtcggcacactatggctgccctctgggctcccagaacccacaacatgaaagaaatggtgctacccagctcaagcctgggcctttgaatccggacacaaaaccctctagcttggaaatgaatatgctgcactttacaaccactgcactacctgactcaggaatcggctctggaaggtgaagctagaggaaccagacctcatcagcccaacatcaaagacaccatcggaacagcagcgcccgcagcacccaccccgcaccggcgactccatcttcatggccaccccctgcggcggacggttgaccaccagccaccacatcatcccagagctgagctcctccagcgggatgacgccgtccccaccacctccctcttcttctttttcatccttctgtctctttgtttctgagctttcctgtctttccttttttctgagagattcaaagcctccacgactctgtttcccccgtcccttctgaatttaatttgcactaagtcatttgcactggttggagttgtggagacggccttgagtctcagtacgagtgtgcgtgagtgtgagccaccttggcaagtgcctgtgcagggcccggccgccctccatctgggccgggtgactgggcgccggctgtgtgcccgaggcctcaccctgccctcgcctagtctggaagctccgaccgacatcacggagcagccttcaagcattccattacgccccatctcgctctgtgcccctccccaccagggcttcagca

SEQ ID NO: 7132 - DNA, 5206 bp, Homo sapiens
atggcggtgccggctcggacctgcggcgcctctcggcccggcccagcgcggactgcgcgcccctggcccggctgcggcccccaccctggccccggcacccggcgcccgacgtccgggcccccgcgcccgctgtggctgctgctgccgcttctaccgctgctcgccgcccccggcgcctctgcctacagcttcccccagcagcacacgatgcagcactgggcccggcgtctggagcaggaggtcgacggcgtgatgcggatttttggaggcgtccagcagctccgtgagatttacaaggacaaccggaacctgttcgaggtacaggagaatgagcctcagaagttggtggagaaggtggcaggggacattgagagccttctggacaggaaggtgcaggccctgaagagactggctgatgctgcagagaacttccagaaagcacaccgctggcaggacaacatcaaggaggaagacatcgtgtactatgacgccaaggctgacgctgagctggacgaccctgagagtgaggatgtggaaagggggtctaaggccagcaccctaaggctggacttcatcgaggacccaaacttcaagaacaaggtcaactattcatacgcggctgtacagatccctacggacatctacaaaggctccactgtcatcctcaatgagctcaactggacagaggccctggagaatgtgttcatggaaaaccgcagacaagaccccacactgctgtggcaggtcttcggcagcgccacaggagtcactcgctactacccggccaccccgtggcgagcccccaagaagatcgacctgtacgatgtccgaaggagaccctggtatatccagggggcctcgtcacccaaagacatggtcatcatcgtggatgtgagtggcagtgtgagcggcctgaccctgaagctgatgaagacatctgtctgcgagatgctggacacgctgtctgatgatgactatgtgaatgtggcctcgttcaacgagaaggcacagcctgtgtcatgcttcacacacctggtgcaggccaatgtgcgcaacaagaaggtgttcaaggaagctgtgcagggcatggtggccaagggcaccacaggctacaaggccggctttgagtatgcctttgaccagctgcagaactccaacatcactcgggccaactgcaacaagatgatcatgatgttcacggatggtggtgaggaccgcgtgcaggacgtctttgagaagtacaattggccaaaccggacggtgcgcgtgtttactttctccgtggggcagcataactatgacgtcacaccgctgcagtggatggcctgtgccaacaaaggctactattttgagatcccttccatcggagccatccgcatcaacacacaggaatatctagatgtgttgggcaggcccatggtgctggcaggcaaggaggccaagcaggtgcagtggaccaacgtgtatgaggatgcactgggactggggttggtggtaacagggaccctccctgttttcaacctgacacaggatggccctggggaaaagaagaaccagctgatcctgggcgtgatgggcattgacgtggctctgaatgacatcaagaggctgacccccaactacacgcttggagccaacggctatgtgtttgccattgacctgaacggctacgtgttgctgcaccccaatctcaagccccagaccaccaacttccgggagcctgtgactctggacttcctggatgcggagctagaggatgagaacaaggaagagatccgtcggagcatgattgatggcaacaagggccacaagcagatcagaacgttggtcaagtccctggatgagaggtacatagatgaggtgacacggaactacacctgggtgcctataaggagcactaactacagcctggggctggtgctcccaccctacagcaccttctacctccaagccaatctcagtgaccagatcctgcaggtcaagtattttgagttcctgctccccagcagctttgagtctgaaggacacgttttcattgctcccagagagtactgcaaggacctgaatgcctcagacaacaacaccgagttcctgaaaaactttattgagctcatggagaaagtgactccagactccaagcagtgcaacaacttccttctgcacaacctgatcttggacacgggcatcacgcagcagctggtagagcgtgtgtggagggaccaggatctcaacacgtacagcctactggccgtgttcgctgccacagacggtggcatcacccgagtcttccccaacaaggcagctgaggactggacagagaaccctgagcccttcaatgccagcttctaccgccgcagcctggataaccacggttatgtcttcaagcccccacaccaggatgccctgttaaggccgctggagctggagaatgacactgtgggcatcctcgtcagcacagctgtggagctcagcctaggcaggcgcacactgaggccagcagtggtgggcgtcaagctggacctagaggcttgggctgagaagttcaaggtgctagccagcaaccgtacccaccaagaccagcctcagaagtgcggccccaacagccactgtgagatggactgcgaggttaacaatgaggacttactctgtgtcctcattgatgatggaggattcctggtgctgtcaaaccagaaccatcagtgggaccaggtgggcaggttcttcagtgaggtggatgccaacctgatgctggcactctacaataactccttctacacccgcaaggagtcctatgactatcaggcagcctgtgcccctcagccccctggcaacctgggtgctgcaccccggggtgtctttgtgcccaccgttgcagatttccttaacctggcctggtggacctctgctgccgcctggtccctgttccagcagcttctctacggcctcatctaccacagctggttccaagcagaccccgcggaggccgaggggagccccgagacgcgcgagagcagctgcgtcatgaaacagacccagtactacttcggctcggtaaacgcctcctacaacgccatcatcgactgcggaaactgctccaggctgttccacgcgcagagactgaccaacaccaatcttctctttgtggtggccgagaagccgctgtgcagccagtgcgaggctggccggctgctgcagaaggagacgcactcggacggcccggagcagtgtgagctagtgcagagaccgcgataccggagaggcccgcacatctgcttcgactacaacgcgacagaagatacctcagactgtggccgcggggcctccttcccgccgtcgctgggcgtcctggtctccctgcaactgctgctcctcctgggcctgccgccccggccgcagcctcaagtcctcgtccacgcctctcgccgcctctgagcaccctgccccaccccacctccactcccacctcacccggcctcttcgcctttcccaccctcctgccccacactccccgccttagagcctcgtccctccctcactgaaggacctgagctggccaggccctgagagtctggtctgcgccttgggatggggagtcccaaagcgggacgccgcaggtgtttggcacccaaatcacatctcacctccgaactgttcaagtgtccccagacccttcttgcctgctgggctccccccagtgggatgggacagggaggccacacgcactggtgccaaaaccaggcctctgctgccgcccttcctggaggctgcctatgttgggggggaccctgcctcagctgacccggcctctctgccccacccaagcccaaacttggtttctgtgagaatagtggaggaaggtgagatggccagtttgaagcctgtgcctcccagcttaaatcctagcaggagagaggctctggggcagcccccatgggctcctgcccctttcaggcctacagccacatccccaagcccaccaggtgtcaggatagtcacagtgataccagttcagacactaccccatatacacctggaacattgaggatggaaactggactcacattcgacataccccactgggcacacgcacaaacacacacactatggggtggggtgggtgtaggggcttacaaagccttacacagggcgaggggttggtgggagggttggcacctgcacactccatctcctgctcaccacctgcctctaatctgagctgcagcctggctggtcctcccatttctaaagctgaatgtcaaacagtgccaaatgctggggcagggggtgaagaaccctctgtcccacccctagccaccagtgtcctccaagtgccccctcacctctccaggtgctcattgtaaccatttctcactagtgtcaggcccccagtgggaccacatgccactgcctgcacctttcggcagaggaacccccaccagacatcaccctttgccttagcaggggtgactttgtctctcctggctgggccatccttccgccaatctggcccttacacactcaggcctgtgcccactccctatctccttcccacccctacacacacactccctgcttgcaggaggccaaactgtccctcccttgctgaacacacacacacacacacacacacaggtggggactgggcacagctcttcacaccattcattctggtcatttcccccaaaggcatcccagcctgggggccagtggggaactgagggcaaggggatatagtgatggggctcagatggactgggaggagggggagggtgatgcattaattaatggcttcgttaattaatgtcatgttgcttgtcgctttctcagtgtgtgtgtgtggtccatgcccactgctggtgccagggtgggtgtccatgtgcacccggcctggatgccagctgtgtccttcgggggcgtgcgtgtaactgtagtgtagtcaggtgctcaatggagaatataaacatatacagaaaaatatatattttaagtttaaaaaacagaaaaacagacaaaacaatccccatcaggtagctgtctaacccccagctgggtctaatccttctcattacccacccgacctggctgcccctcaccttgggctgggggactggggggccatttccttttctctgccctttttttgttgttctattttgtacagacaagttggaaaaacaacagcgacaaaaaagtcaagaaactttgt

SEQ ID NO: 7133 - DNA, 4869 bp, Homo sapiens
agtggcgtcggaactgcaaagcacctgtgagcttgcggaagtcagttcagactccagcccgctccagcccggcccgacccgaccgcacccggcgcctgccctcgctcggcgtccccggccagccatgggcccttggagccgcagcctctcggcgctgctgctgctgctgcaggtctcctcttggctctgccaggagccggagccctgccaccctggctttgacgccgagagctacacgttcacggtgccccggcgccacctggagagaggccgcgtcctgggcagagtgaattttgaagattgcaccggtcgacaaaggacagcctatttttccctcgacacccgattcaaagtgggcacagatggtgtgattacagtcaaaaggcctctacggtttcataacccacagatccatttcttggtctacgcctgggactccacctacagaaagttttccaccaaagtcacgctgaatacagtggggcaccaccaccgccccccgccccatcaggcctccgtttctggaatccaagcagaattgctcacatttcccaactcctctcctggcctcagaagacagaagagagactgggttattcctcccatcagctgcccagaaaatgaaaaaggcccatttcctaaaaacctggttcagatcaaatccaacaaagacaaagaaggcaaggttttctacagcatcactggccaaggagctgacacaccccctgttggtgtctttattattgaaagagaaacaggatggctgaaggtgacagagcctctggatagagaacgcattgccacatacactctcttctctcacgctgtgtcatccaacgggaatgcagttgaggatccaatggagattttgatcacggtaaccgatcagaatgacaacaagcccgaattcacccaggaggtctttaaggggtctgtcatggaaggtgctcttccaggaacctctgtgatggaggtcacagccacagacgcggacgatgatgtgaacacctacaatgccgccatcgcttacaccatcctcagccaagatcctgagctccctgacaaaaatatgttcaccattaacaggaacacaggagtcatcagtgtggtcaccactgggctggaccgagagagtttccctacgtataccctggtggttcaagctgctgaccttcaaggtgaggggttaagcacaacagcaacagctgtgatcacagtcactgacaccaacgataatcctccgatcttcaatcccaccacgtacaagggtcaggtgcctgagaacgaggctaacgtcgtaatcaccacactgaaagtgactgatgctgatgcccccaataccccagcgtgggaggctgtatacaccatattgaatgatgatggtggacaatttgtcgtcaccacaaatccagtgaacaacgatggcattttgaaaacagcaaagctggcaagatgcagaaactggcatcctcacagctgttcatacccttgtcccctgggcttggattttgaggccaagcagcagtacattctacacgtagcagtgacgaatgtggtaccttttgaggtctctctcaccacctccacagccaccgtcaccgtggatgtgctggatgtgaatgaagcccccatctttgtgcctcctgaaaagagagtggaagtgtccgaggactttggcgtgggccaggaaatcacatcctacactgcccaggagccagacacatttatggaacagaaaataacatatcggatttggagagacactgccaactggctggagattaatccggacactggtgccatttccactcgggctgagctggacagggaggattttgagcacgtgaagaacagcacgtacacagccctaatcatagctacagacaatggttctccagttgctactggaacagggacacttctgctgatcctgtctgatgtgaatgacaacgcccccataccagaacctcgaactatattcttctgtgagaggaatccaaagcctcaggtcataaacatcattgatgcagaccttcctcccaatacatctcccttcacagcagaactaacacacggggcgagtgccaactggaccattcagtacaacgacccaacccaagaatctatcattttgaagccaaagatggccttagaggtgggtgactacaaaatcaatctcaagctcatggataaccagaataaagaccaagtgaccaccttagaggtcagcgtgtgtgactgtgaaggggccgctggcgtctgtaggaaggcacagcctgtcgaagcaggattgcaaattcctgccattctggggattcttggaggaattcttgctttgctaattctgattctgctgctcttgctgtttcttcggaggagagcggtggtcaaagagcccttactgcccccagaggatgacacccgggacaacgtttattactatgatgaagaaggaggcggagaagaggaccaggactttgacttgagccagctgcacaggggcctggacgctcggcctgaagtgactcgtaacgacgttgcaccaaccctcatgagtgtcccccggtatcttccccgccctgccaatcccgatgaaattggaaattttattgatgaaaatctgaaagcggctgatactgaccccacagccccgccttatgattctctgctcgtgtttgactatgaaggaagcggttccgaagctgctagtctgagctccctgaactcctcagagtcagacaaagaccaggactatgactacttgaacgaatggggcaatcgcttcaagaagctggctgacatgtacggaggcggcgaggacgactaggggactcgagagaggcgggccccagacccatgtgctgggaaatgcagaaatcacgttgctggtggtttttcagctcccttcccttgagatgagtttctggggaaaaaaaagagactggttagtgatgcagttagtatagctttatactctctccactttatagctctaataagtttgtgttagaaaagtttcgacttatttcttaaagcttttttttttttcccatcactctttacatggtggtgatgtccaaaagatacccaaattttaatattccagaagaacaactttagcatcagaaggttcacccagcaccttgcagattttcttaaggaattttgtctcacttttaaaaagaaggggagaagtcagctactctagttctgttgttttgtgtatataattttttaaaaaaaatttgtgtgcttctgctcattactacactggtgtgtccctctgccttttttttttttttaagacagggtctcattctatcggccaggctggagtgcagtggtgcaatcacagctcactgcagccttgtcctcccaggctcaagctatccttgcacctcagcctcccaagtagctgggaccacaggcatgcaccactacgcatgactaattttttaaatatttgagacggggtctccctgtgttacccaggctggtctcaaactcctgggctcaagtgatcctcccatcttggcctcccagagtattgggattacagacatgagccactgcacctgcccagctccccaactccctgccattttttaagagacagtttcgctccatcgcccaggcctgggatgcagtgatgtgatcatagctcactgtaacctcaaactctggggctcaagcagttctcccaccagcctcctttttatttttttgtacagatggggtcttgctatgttgcccaagctggtcttaaactcctggcctcaagcaatccttctgccttggccccccaaagtgctgggattgtgggcatgagctgctgtgcccagcctccatgttttaatatcaactctcactcctgaattcagttgctttgcccaagataggagttctctgatgcagaaattattgggctcttttagggtaagaagtttgtgtctttgtctggccacatcttgactaggtattgtctactctgaagacctttaatggcttccctctttcatctcctgagtatgtaacttgcaatgggcagctatccagtgacttgttctgagtaagtgtgttcattaatgtttatttagctctgaagcaagagtgatatactccaggacttagaatagtgcctaaagtgctgcagccaaagacagagcggaactatgaaaagtgggcttggagatggcaggagagcttgtcattgagcctggcaatttagcaaactgatgctgaggatgattgaggtgggtctacctcatctctgaaaattctggaaggaatggaggagtctcaacatgtgtttctgacacaagatccgtggtttgtactcaaagcccagaatccccaagtgcctgcttttgatgatgtctacagaaaatgctggctgagctgaacacatttgcccaattccaggtgtgcacagaaaaccgagaatattcaaaattccaaatttttttcttaggagcaagaagaaaatgtggccctaaagggggttagttgaggggtagggggtagtgaggatcttgatttggatctctttttatttaaatgtgaatttcaacttttgacaatcaaagaaaagacttttgttgaaatagctttactgtttctcaagtgttttggagaaaaaaatcaaccctgcaatcactttttggaattgtcttgatttttcggcagttcaagctatatcgaatatagttctgtgtagagaatgtcactgtagttttgagtgtatacatgtgtgggtgctgataattgtgtattttctttgggggtggaaaaggaaaacaattcaagctgagaaaagtattctcaaagatgcatttttataaattttattaaacaattttgttaaaccat

SEQ ID NO: 7134 - DNA, 570 bp, Homo sapiens
tcttcgccggtgcgtcctcgccgcgcccgtaggtcccggcagccgggccccgcctccttcggagtccgagcgatgggcggggaaagggacaggcaggtatagctctgtcggcgccgcggtgtccacctcagtcaggccacggtggaagacgcgtgccgcggcgcctggttgcctgcagcggcccggacccgagaggtcagaaattgatgctgagtacagtgaagttttacaaaaccattgccatatgactgctgagcagtatagctgggatctgaacagagatctgtttgacttccagaacacatccagtgattctccaagtgtggtcctaagctcactcgttcagcatcatctagcgtgtggagtcctggatctcatccttggatttgcagggatggtcctaagaagctaacggctctctgtatttgacaattattgtactgtaatgtgctgcctcctaggggaagatctagaggaagctgaaccatctatctccagaaatgtcttcagaaagtaaagagcaacataacgtttcacccagagactcagctgaaggaaatgacagttatc

SEQ ID NO: 7135 - DNA, 1627 bp, Homo sapiens
ttttattgtcaatctctgtctccttcccaggaatctgagaattgctctcacacaccaacccagcaacatccgtggagaaaactctcaccagcaactcctttaaaacaccgtcatttcaaaccattgtggtcttcaagcaacaacagcagcacaaaaaaccccaaccaaacaaaactcttgacagaagctgtgacaaccagaaaggatgcctcataaagggggaagactttaactaggggcgcgcagatgtgtgaggccttttattgtgagagtggacagacatccgagatttcagagccccatattcgagccccgtggaatcccgcggcccccagccagagccagcatgcagaacagtcacagcggagtgaatcagctcggtggtgtctttgtcaacgggcggccactgccggactccacccggcagaagattgtagagctagctcacagcggggcccggccgtgcgacatttcccgaattctgcaggtgtccaacggatgtgtgagtaaaattctgggcaggtattacgagactggctccatcagacccagggcaatcggtggtagtaaaccgagagtagcgactccagaagttgtaagcaaaatagcccagtataagcgggagtgcccgtccatctttgcttgggaaatccgagacagattactgtccgagggggtctgtaccaacgataacataccaagcgtgtcatcaataaacagagttcttcgcaacctggctagcgaaaagcaacagatgggcgcagacggcatgtatgataaactaaggatgttgaacgggcagaccggaagctggggcacccgccctggttggtatccggggacttcggtgccagggcaacctacgcaagatggctgccagcaacaggaaggagggggagagaataccaactccatcagttccaacggagaagattcagatgaggctcaaatgcgacttcagctgaagcggaagctgcaaagaaatagaacatcctttacccaagagcaaattgaggccctggagaaagagtttgagagaacccattatccagatgtgtttgcccgagaaagactagcagccaaaatagatctacctgaagcaagaatacaggtatggttttctaatcgaagggccaaatggagaagagaagaaaaactgaggaatcagagaagacaggccagcaacacacctagtcatattcctatcagcagtagtttcagcaccagtgtctaccaaccaattccacaacccaccacaccggtttcctccttcacatctggctccatgttgggccgaacagacacagccctcacaaacacctacagcgctctgccgcctatgcccagcttcaccatggcaaataacctgcctatgcaacccccagtccccagccagacctcctcatactcctgcatgctgcccaccagcccttcggtgaatgggcggagttatgatacctacacccccccacatatgcagacacacatgaacagtcagccaatgggcacctcgggcaccacttcaacaggactcatttcccctggtgtgtcagttccagttcaagttcccggaagtgaacctgatatgtctcaatactggccaagattacagtaaaaaaaaaaaaaa

SEQ ID NO: 7136 - DNA, 2306 bp, Homo sapiens
ataggctcagacacaaggagaggcttggagagagcagacgccttctggattcaagaagacgaggctcacctgttactcggcctcccagaaagatggataggagaaatgactacggatatagggtgcctctatttcagggccctctgcctcccccggggagcctggggcttcccttccctccagatatacagactgagaccacagaagaggacagtgtcctgctgatgcataccctgttggcggcaaccaaggactccctggccatggacccaccagttgtcaaccggcctaagaaaagcaagaccaagaaggcccctataaagactattactaaggctgcacctgctgcccctccagtcccagctgccaatgagattgccaccaacaagcccaaaataacttggcaggctttaaacctgccagtcattacccagatcagccaggctttacctaccactgaggtaaccaatactcaggcttcttcagtcactgctcagcctaagaaagccaacaagatgaagagagttactgccaaggcagcccaaggctcccaatccccaactggccatgagggtggcactatacagctgaagtcacccttgcaggtcctaaagctaccagtcatctcacagaatattcacgctccaattgccaatgagtcagccagttcccaagccttgataacctctatcaagcctaagaaagcttccaaggctaagaaggctgcaaataaggccatagctagtgccaccgaggtctcgctggctgcaactgccacccatacagctaccacccaaggccaaattaccaatgagacagccagtatccacaccacagcagcctccatccgaaccaagaaagcctccaaagccaggaagacaattgctaaggtcataaatactgacactgagcatatagaggctctaaatgtcactgacgcagctaccaggcagattgaggcctcagtagtggctatcaggcccaaaaaatccaagggcaagaaggctgccagcaggggcccaaattctgtctctgagatctctgaggccccacttgccactcagatagtcacaaaccaagccctggcagccaccctgcgggtcaagagagggtctagggctcggaaggctgccactaaggctcgggcaactgaaagccagactccaaatgctgaccaaggggcccaggccaagatagcctctgctcagaccaacgtaagtgcccttgagactcaggttgctgctgctgtccaggccctggcagatgactatctggctcagttgagcctggagcccacaaccaggacccggggcaaaagaaaccgaaagtccaagcatctgaatggggatgagagaagtggcagtaattacaggcggatcccatggggccggaggcctgcaccaccgcgagatgtggccattttacaagaaagggctaataagttggtgaaatacctgttggttaaggaccagacaaagatccccatcaaacgctcagacatgctgagggatgtcatccaagaatatgatgaatatttcccagaaatcattgaacgagcaagctacactctggagaagatgtttcgagtcaatctgaaagaaattgataagcaaagtagcttgtatattctcatcagcactcaggaatcctctgcaggcatactgggaacgaccaaggacacacccaagctgggtctcctcatggtgattctgagtgtcatttttatgaatggcaacaaggccagtgaggctgtcatctgggaggtgctgcgcaagttggggctgcgccctggggtgaggcattcactctttggggaagtgaggaagctcatcacagacgagtttgtgaagcagaagtacctggagtacaagagggtccctaacagcagaccacctgaatatgagttcttctggggcttgcgctcctaccacgagactagcaagatgaaagtcctcaagtttgcatgcagggtgcagaagaaagaccccaaggactgggctgtgcagtaccgcgaggcagtggagatggaagtccaagctgcagctgtggctgtggctgaggctgaagccagggctgagatttattccccatgtttacagataccgctaataaattgcagtagtccttcccatggagccaaagtacatccttggaatctttgtccacacagcagtcaaggcagttatggccaatcagctgagggtgtcatgtgatggaaaaatctgtttgctgttcctgctttattgtttgctttctgtgtgctgtcatattttggtatcagagttacattaaatttgcaaaatgaa

SEQ ID NO: 7137 - DNA, 2829 bp, Homo sapiens
gtctgcgctttgcaaagcatgcagttaggggagcagctcttggtgagctcagtgaacctgcctggcgcgcacttctacccgctggagagtgcgcgaggcggcagcggcgggagcgctggccacctccccagcgcggccccctctcctcagaagttggacttagacaaagcgtccaagaagttttccggcagtctctcctgcgaggcggtgagcggggagcccgcagccgccagcgcaggggcccccgcggccatgcttagtgacaccgacgccggggacgcatttgccagcgctgcggcagtggccaagccggggcccccggacggccgcaagggctccccctgcggggaggaggagctgccctccgccgctgcagccgccgccgccgccgccgccgcggctgcggccactgcgcgctactccatggacagcctgagctccgagcggtactacctccagtcccccggtcctcaggggtcggagctggctgcgccctgctcactcttcccgtaccaggcggcggctggggcgccccacggacctgtgtacccggctcctaacggggcgcgctacccctacggctccatgctgccccccggcggcttccccgcggctgtgtgcccacccgggagggcgcagttcggcccaggagccggtgcgggcagtggcgcgggcggtagcagcggcgggggcggcggcccgggcacctatcagtacagccagggggctccgctctacgggccgtaccctggagccgcagcggcgggatcttgcggaggactggggggcctgggggttccaggttctggcttccgtgcccacgtctacctgtgcaaccggcctctgtggctcaaattccaccgccaccaaactgagatgatcattacgaaacagggcaggcgcatgtttcctttcttgagcttcaacataaacggactcaatcccactgcccactacaatgtgttcgtagaggtggtgctggcggaccccaaccactggcgcttccaggggggcaaatgggtgacctgtggcaaagccgacaataacatgcagggcaacaaaatgtatgttcacccagagtctcctaatactggttcccactggatgagacaggagatttcattcgggaaattaaaactcaccaataacaaaggcgcaaataacaacaacacccagatgatagtcttacaatccttacacaaataccaaccccgactgcatattgttgaagttacagaggatggcgtggaggacttgaatgagccctcaaagacccagacttttaccttctcagaaacgcaattcattgcagtgactgcctaccaaaacaccgatattactcaactaaagattgatcataacccctttgcaaaaggcttcagagacaactatgattccatgtacaccgcttcagaaaatgacaggttaactccatctcccacggattctcctagatcccatcagattgtccctggaggtcggtacggcgttcaatccttcttcccggagccctttgtcaacactttacctcaagcccgctattataatggcgagagaaccgtgccacagaccaacggcctcctttcaccccaacagagcgaagaggtggccaaccctccccagcggtggcttgtcacgcctgtccagcaacctgggaccaacaaactagacatcagttcctatgaatctgaatatacttctagcacattgctcccatatggcattaaatccttgccccttcagacatcccatgccctggggtattacccagacccaacctttcctgcaatggcagggtggggaggtcgaggttcttaccagaggaagatggcagctggactaccatggacctccagaacaagccccactgtgttctctgaagatcagctctccaaggagaaagtgaaagaggaaattggctcttcttggatagagacacccccttccatcaaatctctagattccaatgattcaggagtatacaccagtgcttgtaagcgaaggcggctgtctcctagcaactccagtaatgaaaattcaccctccataaagtgtgaggacattaatgctgaagagtatagtaaagacacctcaaaaggcatgggagggtattatgctttttacacaactccctaaagagttattttaacctcaaaaattagctaactttttgcagatggacttggtggtgttttttgttgtcttctttgcctaggttgccaaaaagatgtttgccttccaccttgatgcatcctgttttgtgcaattctctaaaagaaggtgccaaagctttttgattgctgcaggtaactgaaacaaacctagcatttttaaaaaataagattaatggaagactttaaggtattttaaaattcgaagggtatccaaggttctgtatttatttattggggagacactaacccttcaaagaagcaggctgtgaacattgggtgcccagtgctatcagatgagttaaaacctttgattctcatttctatttgtaaattcttaagcaaatagaagccgagtgttaaggtgttttgcttctgaaagagggctgtgccttccgtttcagaaggagacattttgctgttacattctgccaggggcaaaagatactaggcccaggagtcaagaaaagcttttgtgaaagtgatagtttcacctgactttgattccttaacccccggcttttggaacaagccatgtttgccctagtccaggattgcctcacttgagacttgctaggcctctgctgtgtgctggggtggccagtgggactcaggagagagcaagctaaggagtcaccaaaaaaaaaaaaaaaaaaaa

SEQ ID NO: 7138 - DNA, 6409 bp, Homo sapiens
atttttccacccagcaggatgggtgatgctgagagctgcctgctcagacaacagacacgcgaggtcaggaagaagccgcttataaattaccgcttccttcgcgccgccgccaacgccgagccccgaggaccgcaagcccagaggacaagctgcgccaagagggagtgctggagctgttcacccagcgggtcagagagcgagccgggcaggccagcccccggccggcggaaccctggcacagcctgagcagatgctgcgggcggcgccgcagccaccccagatccagaaccagaaccacagcccttctgaggagctcccaaaccaaggagatggccaccaaggagaagctgcagtgtctgaaagatttccacaaggacatcctgaagccctcaccagggaagagcccaggcacgcggcctgaggacgaggctgagggaaaacctccgcagagggagaagtggtctagcaagatcgactttgtgctctctgtggctggcggcttcgtgggcttgggcaacgtctggcgcttcccgtacctctgctacaagaatggtggaggtgcgtttctcataccgtattttattttcctgtttgggagcggcctgcctgtgtttttcttggagatcatcataggccagtacacctctgaagggggcatcacctgctgggaaaagatctgccccttgttctctggtatcggctatgcctccgttgtaattgtgtccctcctgaatgtctactacatcgtcatcctggcctgggccacatactacctgttccagtccttccagaaggagctgccctgggcacactgcaaccacagctggaacacacctcactgcatggaggacaccatgcgcaagaacaagagtgtctggatcaccatcagctccaccaacttcacctcccctgtcatcgagttctgggagcgcaacgtgctgagcttgtcccctggaatcgaccacccaggctctctgaaatgggacctcgctctctgccttcttttagtctggctagtgtgtttcttctgcatctggaagggcgtcaggtccactgggaaggtcgtctacttcacagccacttttccattcgccatgctcctggtgctgctggtccgagggctgacgctgccgggcgcgggcgcaggcatcaagttctatctgtatcctgacatcacccgccttgaggacccacaggtgtggattgacgctgggactcagatattcttctcttatgccatctgcctgggggctatgacctcgctggggagctacaacaagtacaagtataactcgtacaggtcctggcctggccttcattgcctacccaaaagctgtgacaatgatgccgctgcccacattttggtccattcttttttttattatgcttctcttgcttggactggatagccagtttgttgaagttgaaggacagatcacatccttggttgatctttacccatccttcctaaggaagggttatcgtcgggaaatcttcatcgccttcgtgtgtagcatcagctacctgctggggctgacgatggtgacggagggtggcatgtatgtgtttcagctctttgactactatgcagctagcggtgtatgccttttgtgggttgcattctttgaatgttttgttattgcctggatatatggaggtgataacctttatgatggtattgaggacatgattggctatcggcccgggccctggatgaagtacagctgggctgtgatcactccagttctctgtgttggatgtttcatcttctcgctcgtcaagtacgtacccctgacctacaacaaaacatacgtgtaccccaactgggccattgggctgggctggagcctggccctttcctccatgctctgcgttcccttggtcatcgtcatccgcctctgccagactgaggggccgttccttgtgagagtcaagtacctgctgaccccaagggaacccaaccgctgggctgtggagcgcgagggagccacaccttacaactctcgcaccgtcatgaacggcgctctcgtgaaaccgacccacatcattgtggagaccatgatgtgagctctctcgggtcgacggggccggcggctttcctgctgtttactaacattagattctcataggaccaggtttacagagctttatatttgcactaggatttttttttttttgtaattgtcacagaaaatgtaattgtgggtatgtgtgcgtgcgtgtgtgtgtgtgtgtgtatcgtgtgtgtgtgttttgttttgatttgggggatattttgtacaaaaagaaaacccacgggaagatgtccgtggagaggcagagctttcatactgaattagatgtattttatgggaatttggtaaatttttctttgtatttttttttttacatataagtatatatacacttagagattgtcatatacttttaccacttgaattgatcttcttgccagcaatagatctcattttcaaaagcaattcttcggtgctgtgtagctggcagaaagttctgtccagtaaacgcaggatggaattttcctgggactctacacccatcttaaggtggtataccttccaaatcctggttcagatggaagaaatagcaggagagaggacccattagctggcagacccagggggaagaaaggagggctgtgaggagatacctcattaaacttggcttagtgaagaagagagatgccaaaggaatgaaccaacccttcacataaaggagactggctgaagctgaatgaggaggccctatagcagaagtctgattctaagagcagtagaaacttgtaccagaagcaaaatcccacttttaattttgagatggtgagtggatagtcagtagaccgtcagaaccactggccagagagggagctgctagagatccaagaaggctggcaggagtgaggctcacaactcagcctcgcaagaggtggcagaggcacaggaggccacagtccttcctggggcattccaggcagagaaggagcagaggctctcccggcaggagctggggtctcagggctcagatgagtctgttgcatttgaatggggtcatagcaggttctggtcattccccaagcaacatctcagcatctcttaaagttgcctgcaggaatgaagcatgacatacctgttgagggactaggggagtggtggggaggtgagtggaccaaaggatataggccccaggcatgcagatgggcccggtgtcggggaggggtgctttctttcctcatctccccactccccactctcagcctgggagactcctgccaagccctcattaaagatgccaccctgggctgccctggcacctagcaaggcacaccaagaacagcttttgagtctgtatcctccactgggggaagtgctcccagttcagaacaagggcagcccgtggtgctgacctaggatataacaaagctcttcacttcaaaacccctgcaatagctgggtttacagacatttaccacctgcggacccaaaagagaaggcctaggagagttttctagaaggttgggattgtcagggtcctggcccctcagaactggcttgatcaagggccttatgtggagcagaggttgtctctgaaccaggagagaaggtactatacctttcaaatccccagggcagacacacccccacccagcccctatttggacctaaactgtgccatttgaacagtcacttccaagctcagtctaaatgaaaccgaaacgtgaccacgcacaaaggcagtcactgcctcgaggggtgcagaccgcagaattttcacagcaggggctcttggaaccctggaaacccccttcttaaatttgggaggaggagtatgcctttggtgtccccctcccaaggggcaattctgaaccccatctttggcaggcatacatatttcactgtttccaaagctatctactctgccaaacaacacccagtcctattccaaactctcaacgattctatcttgttcctgtttttctatgtatttatggttgccgtttgtgtctgatttgattttactgttttttccctgattttatggagtagcattgtgacctgttttcctttgtcttatataactttagtaaactaaccactgtcaatgattgagggcaggtggcacgtggggaagaggggacttggcacgcagtggctacctgggcatttgtggtcatttcagtttccatctccccagcgggggctccctgggtgaaaggccacagtattttgggttggtaggcaaattgcaacattctggacatggcctgaggaaggcctcttcttataagattctcagaccaaattctagaccaaagacacaggcagaccaagtccccaggccccgcctggaaggaagtcgttcctcaactctccccaaggcacctgtctccaatcagagccctctcgcccagccagccctggctctgtgtgcagagcatagctctgcgagtacctgtgtaataatgctcaaccttcatgtctccgtataaacgaaactttccatgagagctcatgactctggtccacctgtctatagagaatgggcaaagtccttcacctgctttctgcttgggatgggtcagaaatgctgatgcccgcacatagcccagccagccagatctggaaaggaagcgagggggttgtttaaatcaattttttaagatgaagaagtgggagacactgcgttgagatgggccatgctagggccacagagatttcctgacggtcagggagagaagggcctccagggtcccctaacccaacgcccttgttgtaaatgaggtaactgaggctcagggaggcactgtgagccaggaatggattttcttgaaacagctctagctgcaggttctccgaggtaggtgcagggaatggtgagtgtctaaccagggctacatccagcaacatcctcaaggtcttcctgacaaccaaagacaagcctttatggaaaaggaaatgcgctcccctccatgttcagggatgaggggagcagcagcagccacactcccaccatcctcacagaattcctggacccatgcggtggctccgtgagctgggtgactccagcctcacctgcacaccccagccctgcacggggccctccttcctcccagcagcccttggtgagctaggaattgagatccctgtttgtgaaagagggaactgaggtgcagagaagccagaggtgtgccagatccttaggcaggatttagatgaagtcgccctggctccagactgaccccgaggctctgcggggagtttccaggcagcaggaagtggccttggatgctctccttccaggacagcataacccctgggccatgtgcagctccttcactgccccctggatccccagcatacccccaaagacagtggggaaacacaaggggagagcacagcatggcccctccagcccacttcagggcactcttgtatcacccgggtaccgccacactggtcccccacccagccagcatctcccagcacagcccctctccctggggaaatgctctgggtagccagtctaaaggcagaggcacctaactgctccccgcagcccaccccacccaagattcagacacaagccaggaaaggacccaagagaaaatccttcaaggtggcctgaggtcccatccctccctcagacccatgtggtcccaggccaggctgcctgggacacggtaaataccactgtgtgcaaaaatcgaagtacaaaaccacaagactaaacaaaacaaacccagagagccaaacttgtagaggtgggcagtccagaaagcagggggcagccctccccctttccttctctccctgatcctcagaatatatattgttgtaataggaagcatttttgcattgttctcttgtgggtgtcactacagacatgttctggcgtgttctccgagggatggagcatcctgttatatatttgacttcaaattgagatgttggcttcattttttttttttacccaattaatctcccaatccctagcaactgtgactctgtatttagcacaagagaaagctgagaatgtgggtcttgcctccttccagaaatatgtctggctcatcaggacatttttttaaaacttcaaaatatttttaagatattttaaacttttataaaaaaaaaatcaaccaacaagagacttttctgaggaggaacatttgtatttgaacaagatccttggtgtgtagttcagtcttgcagtatacaagcttttgtgtataaatgttttatgatatgattccctgtattttgcaggggtttttttctcttttgctttttagataaatatgtatatcaatattttaaattcatctttgctttttttagaggagtttgtaatcaccttataacatgaaaataaacatttcctttttaacatccaa

SEQ ID NO: 7139 - DNA, 709 bp, Homo sapiens; identical to SEQ ID NO: 6531

SEQ ID NO: 7140 - DNA, 9570 bp, Homo sapiens
gctggaagtagtccatttgtttagagtatcacaagtgtgtgtgtggaaatgctcggatgaagaactgtcaagttaccacagggagataaacagggttatctgaggcggaaagttaggctgattctctgctaggaggtctcacaggatatcatttctttagtgatgctaccgtggtgtaggatttactggtttcacctgtcaatagctacaccacagtcagttttataggttcagagactaaatgtgtcactatgctagatcctcaggctggaattacacagcaagcagacatagacaggaaacgaaagaaactcaactatttttaggctggttatagtggaaaaagaaaaattttagaaaacaaatcactgggccaagtgcattaagatggataaatgaggatggaaaagttacactccaaagaaacttagctgccacttaatgtaaattttttatcttaatttgaataagatattgctaaatatcaatattcaagtatatcaaagcataaccaatacacatgcatatatatcacatatatgtatactatttatatagtgtcatcatattccttatttaataaactttctaagagttcttataagaaaattctttctatagttaaaataaggacattgctaagaaattacacatcaaataatgtcatacacagaattatagaataatgaaaacgttgaatgcatttaattccatatgcctactgtttattgaatttctaatgtacaatgtcactggacaataaatatgaaaataaacatgaaatagttcctaatctccagaattccattgtctaggagaggaaacacatgtgcagtagaccataatatatagagagaactgatatgcgagtttatgtgtagtgtttggaaaccaaaggaggtagagagattgattctcgctgtaataggacagaatcatggtgataacagaaatggcatttaatttagactttaaagtttgtcagtggttaatagtgttagtggcaatatctctgtctaaagaatgaaggatgatgttacataaatgagcaaggagacacacaggctgtaagagtgaatgaggactaatacacagcaggtatattagtctgttttcacactactgtaaagatattaccggagactgggtaatctacaaacaaaagaggtttaactgactcacagttccacacggctggagaggcctcaggaaacttacaatcatggcagaagacaaaggggcatgtcttacaaggtagcaggagagagagagcaggggaaatgccagagatttatcgaacaaccagttctcatgagaactccctcactatcatgagaacagcatgagggaaaccgcccccatgatccaatcaccccccacaaagtcccccccttgacacatggggattacaattcgagatgaaatttgggtggggatgcagagccaaatcatatcagtaggctagcctagatatggaagggttgcaaatatttaattagaagtttagatatggcattggctagctgggtaaggctttaaacagaggaacacatgtatgtaagtgcttcacaaaaataatgtagaaagcaatgaggaagatagaagagactagagggaaatcaggtaggaggggtttaggagtaaaacaagatgaagattaaagagatgcttatttggaaagtaagagcaggtatttagaaatacaagagcaggcatttagaaatacagaaaacagcacagggaagggactgggagtgaactttcaaatgtttttaaactatcctccgttccagagtttcatattcttttgtgaccccctcactgaatttctttgatttttttcttatctagtatagcattatattgcaaagcctactgcattatttcttctttcattttggatcgttggtccttgacttgtggttattaacccagaaatgattctctcagaagaggctcagtttctggtgttatctcggcttccttgcagtggcctgtgtcaagggaatttgtttgaaaagtaaaaagtgtatctctgtgcttttggcaaccagaatcaaaactctatctttctttgctacacttaacacccttttaacttctccgatcattctaaccagttcagcttctgttttctctgtattgaaagtgcatgaatccgtgtcattgtatcctggcctcttgactaaaattacaaatacagcatcaaggcaacactcctaactattctgttgttgcttaaatattacagaaaaaaattaaatggtctatagcatttgactttcatctcttttatgtaaatatgtatttggtttatttagaaatcttaaattagtttcttacaaatattttttgcccctcttctaacaaatttaggataagcaatacttggtagttttttgtgtcatgaattaatggtataccaacataaatcttgtaatattaattttattaagtaggaggttatgttctcagtctgtttttgtctaagaaaacatataaaattgtaaatgacttgctagaaaattaagaaaaaatgtttctgagtatcctcacaacttacagctctttaaacgtaaaattaaaattattttcctctattctcatgttgcattttgcagaaaaaattcatattaatgctgatgatagtccttataagtgttactttttaatataaatatcagtattaaagagaaaactggagttcttaaataacttaaaaggcaaagtaagcagaaagagcatttaaattaatagaacttctttaaaatacattttttcttatgttctaagttcatttgctttgatattgtttatacattttttgtttgtgaatttttgttgttatttgtaattaagtttaaattttaaaatcttgaaataatttttgcccttttatgatatacagtgtagtttctatgcagattatcattggagtctgcgttaaattcaaaatatattcacactatttcttcaactgagtctttgataagtttaagtacactaagtttgttttactaaaagtgttaatttctgaattatagtaacttaaaatacacatcgcagctctcttttggaaaacgattgtgtaataatttaaacaatgtaagagttgaacagtgcagcacatgctttgcttatgtgctgcaaacagatacaggtttcaaatgagcttcattcttctgcacaaaaaatgtttaaaatgtacatgatacttgcatttggctaaagaaatcatgatgaaacttcaaggaagaagcatggacaacttacttgctcattagtatagtgtgtacaagcagatgagattttcaatatatacaactcactagacaactacatttgtttttaggttcaatggtaaatggatggggctctgcatctgatgaggatcgtaacttttctagtcatagatctagtgtaggtagctcctcagatggctctatctttgccagcggcagttttgcacaagcactggtggcagcagcagataaagctggttttaggctggatggaaccagccttacaagaacaggttggtagactccaagtcaacactctttgcatgagagaatcttgtccttggacactgtcctcttttctcctgttctttctccttagtgagtctgactgtagggctttctttaatacgcatgaatacagtttggatgctccattacccaaactctcttctgatgctagttttgcagagccaagaatagactcctcctcaacactttctcttattttcctttctcttcacggctttactgattaattggaatatgcttcctttttatattacggcaaagcagcaactaagattgccattaaattttcaataacacattttgcaaaatcctcatacaattaataatgtacccagtgattaaaattactcagcttttatctccattactttcctttgcctcatctctttctgcaaatgcattttctgggaaggtttccttagcatggggtgaatgggtctaaggttgtcggtcttaccagttcaaatagcttatgatctttttaattgtttggctagtaagattttaatacaataatttattatttgtcttaaaggatgctaattaaagatacacccactgcatttgcaagttgaataaaataatgactacatgtgtatttctctttagaataatttaattttgatttctgagagtgataagtaatcatataaaagaacaattatataatttttcaagtgctgctcattccacaaaaaagaatgtgggattaataatagatcagtaatttgtaaacttttgcaacaaaataacttaggcatgatgcgtgcttttacatttgtatgtataattcttaactatacatataagaatattctaatatatgaattaaactgaattaccttgcaaagcaaactaataaaacattaagtacatttgcaaaatcttaactgtaatcaaatagtaaagaaaaaagatttttacccttcactaaactctcaggttataaaaatgagtcttggaagttttcttggaattataccatcaatatttcttttaagcatacattagctatctttaagtgaaataaaaaagatcttctaagcattgcagaggtttatttttcaaatagcatccaaactaaaatacgttgtaatagaactgttatttgaattgtcttgcattataaggcataagtctgaaactttatgttgcttgagtgctttttgcagcattagctgtaaacagagcagtgagaacgtgcaaggaaactaatacattagaaggcacaagtgcatttcctgcatgtatgctaatagctaacacagcattaagtaatatcatatcacgtcgtcgtaagaaaatgtaactacatataataatgttgtatgaaatgaaaacatacacaggagaataaatgcatgcacataaaccaggcctctgttactacaataaacatggtattgaaatcataagttgttgaaaatttattagctaaccttttcccagaataaatttccccgtatacctactctaaaccacaagaaaaggacacagcacatatcatttttcaatgagaatttggagcctgctcagatacaataatattaatcagaaaatacctattgcatgctggatatacaaggtgattttaacctgctatcctctacacagatgttgttgagtttctgccaaaagagatagaattcattgtgtatgtggataagtggtaaggtcaatttaatatatgtgtctgagcagacctttcatgtaaaatttcagatgtaattactatatgacatttttctgtgttcagagagattttgtaagtttccaaggatgaaattttattaaacaaatacaacagtatatacttcataaatagcttctttaattttaagaaataaaaactgcatgaatttgcatatatctttgacaatatcaataatattgtcaaggttaaataaaagtataatcatgcaatattgagttgtggattggtggatctgttttatgttcatttgtttgattttgagggggccagtgggggtgttgttagcttattaaaaattgaacaaaatatgtgcagctgagaatgtagaaaatacatttttctacagagatgcaccaatatttggtatcttcatatgttatctctaggtagatttacaggttagtcatagtgcagaaatataggacagaatcagtgtgctataatgtcattctctagaacccattccctttattttcattttaggaaaagcctttacctcctctcaaagacctcgacctaccagcccattttctactgacagtaacaccagtgcagccctgagtcaaagtcagaggcctcggcccactaaaaaacacaagggagggcggatggaccaacaaccagcattgcctcatcgaagggaaggaatgacagatgaggaggccttggtgccctatagcaagcccagtttcccatctccaggtggccacagctcatcaggaacagcttcttctaagggatccactggacctaggaaaaccgaggtgttgagagcaggccaccagcgcaatgccagcgaccttcttgacataggatatatgggctccaacagtcaaggacagtttacaggtgaattatagtaaatgagaggagacatacaaagctgctctgaaggaccatcaggtccggactcatggaagtgatgactctaaacagtgcaatgaacaatttatttatgtactattaaaagaactgtaaatgcaatgtaaagacacacagccacacatatcccacagatattttcattgtgttcttctcttaagtacaccacccaccttaactctttcttgtcaggagtatataaaaaagaaagaaaacaaaactcgccctacaggaagaaaaggattctcctctgtatataatttcttttgtgcattgctatgcaagctcactctttttagctctgctcatattattgtctgttcttattggtctgttgtactatatgtgaattaataggctgtggtgccatatattaacttttaattgtgtaacttttatgtttaaattttgcactgcaattttatttggtgataagcacaaatctctactcctcatgacatgaagaaaaagactgaatgtgaagggagtttctgtactgtaagctagattggataatgatggctgtaacaaatcatgttagatggttttcagttggggtgtagaaataggaagatgcaaaggaacaatggtgttggcaaagtcttctttgaatatcagggactgagtcaataaaaaaaatagtagaaaggtggcttttactattgacaaaagccggggtcaaaaaaagtagtttaagtcttaagactgaatatgcattaaagtatgcaggtagcaaagatgtaataaatttgcttaaaaaaagaaattaaagttttatttagaatcaattttacctgtcattgtaattgacccatctgagaattacaataagcaagaggaaattaaggtgttttgcaagagctgtatttatattacagttttttaaaaacattttctgaattatcgtaattaagctctccaactcgttaagtcagaatataatatgaagttccccaaggaaacgaacaaaatgaactctagaatatctagcaaatagttaaagaagcaatttattattagggcatactcgggctgtttccaaatataaactctattgcaatatcttatttcatctttctaatacatgtacagtgcacactagaggatagagctgcatcacttaaattcatgacttaaaaaataatacagtttatatacaacttgttttttatttgattaagaagtgaagtttacgccacccaatgtatagccaaattgtacgtgcttaaaaaacagtgccgagagtatgttcagttcgcagtaagtagatttattggaataaatattctatggtacattctcagaaattggcttccaactaaaatacgtttgacccattttgaataaggaaattgaaaagaaaaatttaaaaggagaaaaaaatgcatgtttataaactttttaaataaaaccagaccttgtaagtggacattaataattgtcctgcctcatttgttttcacgactttgacaacaagaagttcctgaacattagtcatgtatgctcagaataaatgtgactttgaaatatatgttagctactgtacatgtatagtcagtcaagtagaagaggaccttcctgaaattcccacttgtgacattttcccatgggtttcctacacaatcttaaattttatttctgtctatactttctcaaatttttcctatgataagttcagttgttggtactcttctaaaaatattcaacgtgattaggatcagttctaaaatacgggacccctttgagtgacaattcgcactccatgcattattggctcagtagccaatttttgtcacgtcgttataacaaggagatgacataattaaacatttccatcctttctattccctgagactgcatcagcacaggcaagtatagaatgtaatgttcttcatgggccccaccagctttttggtgccatgtaatttatttcttcgctgaagagaaaaagaattctgagacacagttattaaaccctttatcaactttctaccatcagtgcctgaattctaatgcagtgtgatttctctgggacaaagagactgaggaagatgaaaagtttcttcaaagagtgaatacatacttattcacaactctaggatgtgaggactttaaatatctctttatgaagttccctgcctaacctctttctatttaaaggcaaacaaatttcgaagaggttttgtgttccctctttatgtttctctatgacccagtttagtctaaaaccttagttcattacatatacaacacatagcctttgatccctggtaactggcaggtgttggtgattaataaaccaaggcttcaaagtgaagtatgtgtgtgcagatgacttttggaataacgtgggcatagcatcataccttcctgattgtcttcagcatataaaaattaactgttgtagttaaaattatgtcagtgcagagcttgtggttacttggaatgttctttcagaatagtccatgttgcctattaaacctagttttaaacacattgggcagtcaatttatgcacccaaaatatcaccctcaggtagattgagggcaagataaaatgctgtatgtagctatacaaaggaattcagaaacattactggaaagcaaagcctttgtcagcttgctactgacaaagtagtaaaaagctactaatcagtgttgagtcagatgtcaacagaaaaatacaaatacctatgagagccacagcagtttctcgtttcatagccgattcaatgaatatgattagaaattcactgagctcactcttgcaggtttaaatggaggcctgcataaggactgcaagaggaaatctgggtgggagagaatgtaatctgatcttgcactcataggcaatgctgcaatgcaatcatgtccaatacaagcacagcttcattcataacaggaaacgtcttctttgggaaaatagctctattggtgcccaaactcaggtatgccagtgtatgcaggtggagtcgccctacccctcttccaaacatgtcctgtgagatttttaaaataagatgggatagtacaggggcatgaaaagaattgattccttcacaggatttgaatccagttcaagggagaatgtagaaaattcaaaaccaacatataaggtatcacacaaccaagaaaagtaaaaccattgcaagtttacttgcgttgagtacaaaacagatttaatggtgttctatgtcatagtttaatgctctgggtatttaaatatgttttcaacaggatttgagttgaaagtttgtaatgtgctttgatggaacacctctcaatttctattcaataaacttatgtaattgtccattgacaatataatgataacagtaccattgaactctaaactgtggtttatcttcactactgggaagcaactgtgcatcagtattaaagatatgcagaaacataatattca

SEQ ID NO: 7141 - DNA, 707 bp, Homo sapiens
ggatccaccagaaaaccttcacttgtctgaaagacagaacaggagtgttcggctgacctgggaagctggagctgaccacaacagcaatattagcgagtatattgttgaatttgaaggaaacaaagaagagcctggaaggtgggaggaactgaccagagtccaaggaaagaaaaccacagttatcttacctttggctccatttgtgagataccagttcagggtcatagccgtgaacgaagtagggagaagtcagcctagccagccgtcagaccatcatgaaacaccaccagcagctccagataggaatccacaaaacataagggttcaagcctctcaacccaaggaaatgattataaagtgggagtaattctgaggatggtcttgtgaagaaagcatcatgaacgccttattctagatctggagatggcatccaggattatgaatgtcttgcccatcaccacacaaccagaaatccgcaaagctaggatttatgtatgaggatctttggactccaaacctcactttttcctcctttacatatctcggttaaatgttattaaatagacttcaccatttgaattttgcataaaaatgcccatctacccagataattttaattattctagggtcatttccaaattttttctgtaacagtggggcattttattttctctctactacttggatgtatttaatgaccagtatat

SEQ ID NO: 7142 - DNA, 801 bp, Homo sapiens
gaacaaatgaatcgcatgtcctacaatgagaaatcagatatctggtcattgggctgcttgctgtatgagttatgtgcattaatgtaagtatgatgaagacagattcctagtctaagcttttagccagaaagaactcgctgggaaaatcagagaaggcaaattcaggcgaattccataccgttactctgatgaattgaatgaaattattacgaggatgttaaacttaaaggattaccatcgaccttctgttgaagaaattcttgagaaccctttaatagcagatttggttgcagacgagcaaagaagaaatcttgagagaagagggcgacaattaggagagccagaaaaatcgcaggattccagccctgtattgagtgagctgaaactgaaggaaattcagttacaggagcgagagcgagctctcaaagcaagagaagaaagattggagcagaaagaacaggagctttgtgttcgtgagagactagcagaggacaaactggctagagcagaaaatctgttgaagaactacagcttgctaaaggaacggaagttcctgtctctggcaagtaatccagtaattaagaagaaagttcatttcagtggggaaagtaaagagaacatcatgaggagtgagaattctgagagtcagctcacatctaagtccaagtgcaaggacctgaagaaaaggcttcacgctgcccagctgcgggctcaagccctgtcagatattgagaaaaattaccaactgaaaagcagacagatcctgggcatgcgctagccaggtagagagacacagagctg

SEQ ID NO: 7143 - DNA, 1520 bp, Homo sapiens
agtcataaaggtctctttgccaagttactgccctctcaagctgcttccagtgaatgctacacacctgcaccatggtttgtccgacatccttagccaagatcaggattggctatgttggtacttacatatcctcatgagaattgtggttctggtactagtttggtaaagaaattattaaacctagctgatgcttgaaggtagttggattaacaggaaagaaaagagacttcttttctagccaagatgaaagatacacaagacattcaggaagcttcgaaggcaatgcagaataaagtccatgagcaggaagataagaatgagaaacaaaaacaaagagaagacaaacttggagtatattctttagtacatttttccccaaagatgttgggttcagttgccacaacactgccattgtcatcttcaaattccagtggaatgcctcttggttactatctgtctagtcctcagattagtagagtaactatatcaacaactggacaattgacttctaaagctactgtaggtagctgttccagagtggaaaacagcttggatgccagccccttctcagttccgaagaaacaggatgaatcacccatgattggggatggagaagattatttcctttctttgtttggtgattcaaagaaacttacagcacactcaaactacactcagaaaactttaaaatacttttctatgattcttgaagaagttggccaatttacctccagttctcttggagatgttgaaatagctgaagtgaatgtcaagggtttgttcgtgaagctcattaactcttcccttgacaaagaaatggcaattggagatcatattctccagcaaaatgtgaatggacaaaccatttctttgtaccgattccttccaaacatcgtaatgcaggcaaattccacagtaacagccattgcgtggtacacccctatccactggaagcaagcgtgggaaaaattagatgctgacgttgaatttaacagatgttcagtagtatctccaacattccgaaagcgtgtgtttcagtggacagcatctacagctacaataactaaagaaaaacaagatcaacctaagaaagatatctcaaattatcaggtggaacaagctcaagttcttcttaagagagagaaggaaatcccaccaaccgttttccctaatcgcagcccttggtgccagaatccctatgtctctgcacatccttactgtcctctgattgaaccacacaatacatccaccgctggaggcagattggatagacagcccaggactcggtcaaccagacctaatcgagcctcagggtctaagaaaaagaagacatctgagtcacaaaagcaataagcagtcaactcaacctttaaagctttacctttatggtgtcatggtccagttgtatggaagagtaaaaagacctgcaatctaggctccctgccatgctggccaaagacattccacaacttaaagaaaatcaaatgcctgagcaaacgtagcgggttccgctttcatag

SEQ ID NO: 7144 - DNA, 972 bp, Homo sapiens
gcccactgccccactgtacccacccaagcactcacctaagctggccatggaaatgtgaatgaaaagcctgacccaggccctcttgccctgctaacccagcaaggaggctctgaccagccagccagcaagtgactttttctgtgacatctaagtggaattcaatgaatgatttcggaatcaagaatatggaccaggtagcccctgtggctaacagttacagagggacactcaagcgccagccagcctttgacacctttgatgggtccctgtttgctgtttttccttctctaaatgaagagcaaacactgcaagaagtgccaacaggcttggattccatttctcatgactccgccaactgtgaattgcctttgttaaccccgtgcagcaaggctgtgatgagtcaagccttaaaagctaccttcagtggcttcaaaaaggaacagcggcgcctgggcattccaaagaacccctggctgtggagtgagcaacaggtatgccagtggcttctctgggccaccaatgagttcagtctggtgaacgtgaatctgcagaggttcggcatgaatggccagatgctgtgtaaccttggcaaggaacgctttctggagctggcacctgactttgtgggtgacattctctgggaacatctggagcaaatgatcaaagaaaaccaagaaaagacagaagatcaatatgaagaaaattcacacctcacctccgttcctcattggattaacagcaatacattaggttttggcacagagcaggcgccctatggaatgcagacacagaattaccccaaaggcggcctcctggacagcatgtgtccggcctccacacccagcgtactcagctctgagcaggagtttcagatgttccccaagtctcggctcagctccgtcagcgtcacctactgctctgtcagtcaggacttcccaggcagcaacttgaatttgctcaccaacaattctg

SEQ ID NO: 7145 - DNA, 568 bp, Homo sapiens
cttcttggaacaatgtcccaccacggaggagctcccaaggcctctacgtgggtcgttgctagtcggcgaagctcgacagtgtcccgagcgccagagaggaggccggcggaggagttgaatcgaacaggtcctgagggatatagtgtcggcagaggtggtcgctggagaggcacctctaggcccccggaggccgtggccgctggtcacgaggaactgccgctgtgttttgctttgaagagccactttgttggcgcggtaatcggtcgtggtgggtcaaaaataaagaatatacaaagtacaacaaacaccacaatccaagtaagccatctgtgtttttcggcccttaagagagcatcatgcatttctaagggagcacctaactctacttttctttttaagacagcctcattctgtctcccaggctggagtgcagtgacgtgatatcagtacaacctctgcctcctgggttcaagcaattctcctgcttcagcctcctgagtagctggaattacgggttcccaccaccaagcccagctaatttattttattttatttttttatttttagt

SEQ ID NO: 7146 - DNA, 1153 bp, Homo sapiens; identical to SEQ ID NO: 6923

SEQ ID NO: 7147 - DNA, 2090 bp, Homo sapiens
gatgcctgatctcatcaatctagcgggagagacaggataacctgtccgagagtatagcgccactatgactccgccggaaaaattactttaaaaatcgccaaaaattacttggagcaaagggcagtcggcggagcttcgccaaggctggcgcagtcgccgttttctcgacccggtgatggccgtcatctcgtgacaagaaacttaaggtcgacagaaaattcaggacccggagtcatgggtccctccggtgggtcgtggcaacagtcccccccgccaccgcccggcacccatctatctatattgtcttttgacgctgaagcgtgaggtgccccaggaaagagtttcccaagccctggctgccctcccccggcgcgctgggtcccggtgaggtctctaggtaggttttgacctgtagcagagaaccaattctggagaacagcctcacttctttgattgaatacttacataatgcattggaacatgacatgagattaaggtttaataatgatagaatgaagaccacaataaaagagacctctacttagctcagcaattcttacctttcttacctatttgatgaagatgtcttttgaaaggtgtactgcaaggaacaaaatgtttgtaaattctccttttaccaaggtttcttttttaattgatgccaaagagttccaatattgaacatcttaagtctgttacttggattacggattgagtttggagcttactcagaggactacaggagagtatccaggaagtggataattactgtaccttcctcatggaaaaagttttatttaaagtgttatttctcattgaatactatcaaaaaggaaaaaaaaatgacctaaacttttgagatagatttggctctagtaagtatttagttatatcacttgcatatctgggagaagaaataagagactatcatcagtacattcccatctactaaaaaaatttattttacacatgtcaagggattacttataacttccattttattactaatagcttgaacccttttaatgaagacctaactcctccaccagaaatttaagtttatgttcttactttgtttacttataaaatacatctcaggtatttcggatgtcttttttttttctaagcctatatgaaatgaaaaatatattggcaaaataaatgtttaaaccttttacgttaaaattactttgaaagatgaaaagttagtgctgtttttgtctacgttatactgaaattaaatgtttataatttatattttgggtttatgtataaatcatggaatttatgcaaaaatatgagtagtacagattctcctctaattctgtaggactttgaataatgtgatatttttcttataattggacccttgtgttttgaagaaatgccaactgcttgaagaatctccttgttatttgtattatttgctatagggttagatgttgagaaattctgctgacaaaaaattttaagccagttttacactaaatgttcctcagtctgattaatttgttattggatgtattctgtatctttcttttgtaatttgtaacttttatccacttagcacgaatgattctattaaagaaaatcattaggaagtggtagaaactttaaatcgccccagagtttgcctgtttccatattttattatcttataatcttcgggagtgcttacacttatggagctaacattttcagagatacagcttcttatagtaacactaaaactttcttcctctttggactgaatacctataattataactatatggtagtttaagtttccttgtgattagtcaaaaataccattttagtatgaagcaatgaagtctattatttgttgtcccataattgagaaagcttaaatacaccttttattaagagtttgtaaattctagcttagtctacacagatttttatatcaatttgtttatatttttattaatgtcatttctggaagtgtgaaaatgttaatgttcaacaagcaacattaaaaatagatttgaaacatttatatatagagaggtacacatttatttactgtttaggtactgaagattatcacttaataaaaaatatatatccca

SEQ ID NO: 7148 - DNA, 547 bp, Homo sapiens
gacagcagccacacctctgcagagagaatggtgagtgcctgctggggaagaaaggctagcggtctcccaggtgctggcctttgggctgggggagcagagttttctgtgcttgtgttgggttgagggtggtccccagggagaggaagaggatcctggccctggctctcctgggaatgctctgggactgtgcatgatgggtggggtggggagactctgaggagttggggagaggacccctccctactcacagtgttgcaggccagcaggaaggcggggacccggggcaaggtggcagccaccaagcaggcccaacgtggttcttccaacgtcttttccatgtttgaacaagcccagatacaggagttcaaagaagccttcagctgtatcgaccagaatcgtgatggcatcatctgcaaggcagacctgagggagacctactcccagctgggtgcgtgcacccacctcccaccctgcgcactggggtccctactctgagctgctgggcgggtgggagtggctggggggacaggactctgctcccctgctt

SEQ ID NO: 7149 - DNA, 4458 bp, Homo sapiens
cccggccccgcgcgcagtccagcggccccgcgtgtgtgccctcgccctgccggagccgggaaaatggaggctgtgattgagaaggaatgcagcgcgctcggaggcctcttccagaccatcatcagcgacatgaaggggagctatccagtttgggaagatttcataaacaaagcaggaaagctgcagtcccagcttcggacaacagtagtagcagcagctgccttcttggacgcctttcagaaagtggctgacatggccaccaacacacgtggtgggaccagggagattggatctgctctcaccaggatgtgcatgaggcacagaagcattgaagccaagctgaggcagttttcgagcgctttaattgattgtctgataaacccacttcaagaacagatggaagaatggaagaaagtggccaaccagctggataaagaccacgcaaaagaatataagaaagcccgccaagagataaaaaagaagtcctcggatacgctgaaactgcagaagaaagcaaaaaaagggagaggtgatatccagcctcagttggacagtgctctccaagatgtcaatgataagtatctcttattggaagaaacagaaaagcaggctgtccggaaggctttgattgaagaacgtggccgattctgtaccttcatctctatgctgcggccagtgattgaagaagaaatctcaatgctaggggaaataacccaccttcagaccatctcggaagatctaaaaagcctgaccatggaccctcacaaactgccctcctcaagtgaacaggtgattctggacttgaaaggttctgattacagctggtcgtatcagacgccaccctcttcccccagcaccaccatgtccagaaagtccagtgtctgcagcagcctgaacagtgtcaacagcagtgactcccggtccagcggctcccactcgcattcccccagctcacattaccgctaccgcagctccaacctggcccagcaggctcctgtgaggctgtccagcgtgtcctcccatgactcaggattcatatcccaggatgccttccagtccaagtcaccatcccccatgccgccagaggcccccaaccagaactcgtccagctcggcctcctccgaagcctcggaaacctgccagtcagtgagcgagtgcagctcccccacctctgtcagctcgggctccaccatgggtgcctgggtgtccacagagaaggactgggctaagcctgggccctatgaccagcctctggtgaacaccctgcagcgccgcaaagagaagcgagaaccggaccccaacgggggaggacccactaccgccagcggcccacctgcagcagctgaggaggctcagagaccacggagcatgactgtatcggctgccaccaggcctggtgaggagatggaggcttgtgaggagctggccctggccctgtctcggggcctgcagctggacacccagaggagcagccgggactcgcttcagtgctccagcggctacagcacccagacaaccaccccctgctgctctgaggacaccatcccttcccaagtttcagattatgattatttctctgtaagtggtgaccaggaggcagatcagcaggagttcgacaagtcctccaccattccaagaaacagcgacatcagccagtcctaccgacggatgttccaagccaagcgtccagcctcaactgctggcctccccaccaccctgggacctgctatggtcactccaggggttgcaactatccgacggaccccttccaccaagccttctgtccgccggggaaccattggagctggtcccatccccatcaagacacccgtgatccctgtcaagaccccaaccgtcccagacctcccaggggtgttgccagcccctccagatgggccagaagagcggggggagcacagccctgagtcgccatctgtgggtgagggcccccaaggtgtcaccagcatgccctcctcaatgtggagcggccaagcttccgttaaccctccacttccaggcccgaagcccagtatccctgaggagcacagacaggcaattccagaaagtgaagctgaagaccaggaacgggaacccccaagtgccactgtctccccaggccagattccagagagtgaccctgcagacctgagcccaagggatactccacaaggagaagacatgctgaacgccatccgaaggggcgtgaaactgaagaagaccacgacaaacgatcgctcagcccctcgcttttcttaggttcacaagaaatgcgccggtggggaatgaactgtttcattaataaaacctaatttgtcttgatccattccactctataataaaacaaaagattttgtaggcaactcggaatatagctcttttgaaagtactcgacacctttagataagaattaaaaccaacctatgtaactgacataatcttgatcttttaatttgtaaatattgacaattttctttctgcacattttaatcttagtttcccttttgatttttctgaaggtgccaaattccatttaacttttttacaagtctttgtaaaattttaaatgcataaagggggttggggcaggggaaccacgaagtagttaattttagaaaaggatttactatacttcactcttctttttttttccccacaagcttttgtagatgcattgtagtagtctagcttagaagcaaatgcaagttattttaatgtacaaactaaatgggtaagaggtaaaatcttcatttaaatatactatgttctggatgaaaagagcaggagtaacaattgatgagcaatattcagagtgaagtaaatctggaaatggtagactgtgttgggattggggggagggccatgggaggggtacatcgtcaacatagccgatcctgttacatttaagagtagcctcgtaggttgaatttcttctggtagcttcatggtaaatgcatccgaataagccatactggattgcagtgtttgtttctgtagggtgtttaaggacttgacttcctttctcccatgattcctctggactgcacacagcacccacaaccagccccatgcatgctgctgcctctgggcagtcgtagaatctcccacttcagtttctcgttgattgtactcacctttatggaatccaaatacatccaaaagggtaaggcagttttaaaaatgtgaaaacatttaaaaatgataatagcagggaattcttagattatagtaaatgccttttacttaactgtgcccagcaggctgggtgcgttaaaaagcccaagtattttgaaaaaactcgaacagatttgacaagggtagccagcttggagtctagcaacttgccaatgtgtttaccaatctgggggcttgtttttcttttcttctttcaaataaatggcagttaactggctttacagtaaacattgaagagaggaggatttgtttattgtcactgggaatctgaccactatactgtcctttttttgtattctgggtaaatgttttttggaaaagatttgtcttttctaagtggaagttaaatttgttatactgcccatcccctaaagccaacagagatttgtagatttaaagggatcacatttgaagacaatagtgtttaagaaagcaagcaagtcccttagcagtcaggtcataacagggcacatttctgaccgaaccctctcaaggcagaggaggagtttggtgggtttcatacaccctgcagattcctgttggctctaaccctcaattacctaatcttatgctttaacacataactgcattggatgtgagagtaacgtaccgtatggtcattgttctatatattaacattgaacactgctgcgattgctcaaggacattttatgttacggctttaaagcaaaggcatgattattagaaactatttaagcttttttctttgaaaaacaagctccttttacagaatataaacaacagtagtgcctgtggtttagcccaccaatcttgatgactaaaagtagctgatgcattgtgcatatgatgcttgagatggtttttgcaaaagcagaaatcgctgcaaggtaatcacaatagataaaagtggtattttaaacctttgaaataaatggatgtaactgtaccttggtacagcttttcacttgtttagtttttaaacgttagtataatctgaataaataaaatgttgccaaattcaatgtagaaagaatgtgacaacacaccttgggtagttctgcttgtgtttttgcatattgtaaaagcagtgtcacagctaaaaagaaagaaatcgtttctaacagtaaattattgtgctttagttgctagtttgtactgagagttgacctctccctgtgcagttttttgttctaaacttgtataaataacaattgtgtaatgtgtctccctcctacattgtaacaattgcttcagcctacgttataaataaagaaccactagatt

SEQ ID NO: 7150 - DNA, 1874 bp, Homo sapiens
gcttttggacaaaaatgcatctgactgtatttttacttaagggtattgtgggtttcctctggagctgctgggttctagtgggttatgcaaaaggaggtttgggagacaatcatgttcactccagttttatttatagaagactacggaaccacgaaagacgggaaatacaaagggaaattctctctatcttgggtttgcctcacagacccagaccattttcacctggaaaacaagcgtcctctgcacctctctttatgctggatctctacaatgccatgaccaatgaagaaaatcctgaagagtcggagtactcagtaagggcatccttggcagaagagaccagaggggcaagaaagggatacccagcctctcccaatgggtatcctcgtcgcatacagttatctcggacgactcctctgaccacccagagtcctcctctagccagcctccatgataccaactttctgaatgatgctgacatggtcatgagctttgtcaacttagttgaaagagacaaggatttttctcaccagcgaaggcattacaaagaatttcgatttgatcttacccaaattcctcatggagaggcagtgacagcagctgaattccggatatacaaggaccggagcaacaaccgatttgaaaatgaaacaattaagattagcatatatcaaatcatcaaggaatacacaaatagggatgcagatctgttcttgttagacacaagaaaggcccaagctttagatgtgggttggcttgtctttgatatcactgtgaccagcaatcattgggtgattaatccccagaataatttgggcttacagctctgtgcagaaacaggggatggacgcagtatcaacgtaaaatctgctggtcttgtgggaagacagggacctcagtcaaaacaaccattcatggtggccttcttcaaggcgagtgaggtacttcttcgatccgtgagagcagccaacaaacgaaaaaatcaaaaccgcaataaatccagctctcatcaggactcctccagaatgtccagtgttggagattataacacaagtgagcaaaaacaagcctgtaagaagcacgaactctatgtgagcttccgggatctgggatggcaggttcatctgatgtttcctgaccacgtaccaaagccttgttgtgctccaaccaaattaaatgccatctctgttctgtactttgatgacagctccaatgtcattttgaaaaaatatagaaatatggtagtacgctcatgtggctgccactaatattaaataatattgataataacaaaaagatctgtattaaggtttatggctgcaataaaaagcatactttcagacaaacggggaatttcctaaaattagtctggctcattttgactcttttcctatgtacaatatcatgtatatagtcatttttatttatttaaacgtatatattctcttctgtggaggctttatcaataaaatctatttcataggccactacattatacaatagatcatctagtataattttcaatgggttatgctgagtccattcaattccatttcaacatttttttctaatacaattttacataattttctgagattagacagaactcctttgactgtttaatattgtggaaggaaattgaataatttagttatattgtgccaatgaaaaccatgatagaatatttatttagaaataagacttaaaaaaataacaacccaaacaaaaattcttggataaacacaatttctcttttagagttcctgcttcattagataaagtgaaatgttgaactggatttgaataaataaacggtaggcagaacatagaagctgaaagattgcacagaattgttttaactgtttgctttaaca

SEQ ID NO: 7151 - DNA, 1766 bp, Homo sapiens
tgcacccacagcagtctgttgtggatggttgctgagctgcgcattcggcattgggcttgctttgtttcctgccaggcccagcattttcttctaccagatcggcaggcttgtgggcttcttcctaggtccctcccctgcactctgaataggaaagctggaagctgtgctttagagaagctttaagacgccgaaagaaaccagaagagtgagcgccagttgtatgtggcatggaatattcacatgggagagccgcatgaggccgcccaccacgcttcctgaaggatgcccgtgtggaagaattttgacgtgccagtgtcctcgttctacagggtgttccattcttccgcaatctcagaaaaatgggactaaaagaaactattttgtaaaataagaagacttccatttttaatgaccaacatgtattaagatggacacctactctacgaaacacgaagttctatggtctcgaagaagcccgtgcctgtttaaaactgatcctaactaaaaacagacttgagtggatatgagaatgttggttagtggcagaagagtcaaaaaatggcagttaattattcagttatttgctacttgttttttagcgagcctcatgtttttttgggaaccaatcgataatcacattgtgagccatatgaagtcatattcttacagatacctcataaatagctatgactttgtgaatgataccctgtctcttaagcacacctcagcggggcctcgctaccaatacttgattaaccacaaggaaaagtgtcaagctcaagacgtcctccttttactgtttgtaaaaactgctcctgaaaactatgatcgacgttccggaattagaaggacgtggggcaatgaaaattatgttcggtctcagctgaatgccaacatcaaaactctgtttgccttaggaactcctaatccactggagggagaagaactacaaagaaaactggcttgggaagatcaaaggtacaatgatataattcagcaagactttgttgattctttctacaatcttactctgaaattacttatgcagttcagttgggcaaatacctattgtccacatgccaaatttcttatgactgctgatgatgacatatttattcacatgccaaatctgattgagtaccttcaaagtttagaacaaattggtgttcaagacttttggattggtcgtgttcatcgtggtgcccctcccattagagataaaagcagcaaatactacgtgtcctatgaaatgtaccagtggccagcttaccctgactacacagccggagctgcctatgtaatctccggtgatgtagctgccaaagtctatgaggcatcacagacactaaattcaagtctttacatagacgatgtgttcatgggcctctgtgccaataaaatagggatagtaccgcaggaccatgtgtttttttctggagagggtaaaactccttatcatccctgcatctatgaaaaaatgatgacatctcatggacacttagaagatctccaggacctttggaagaatgctacagatcctaaagtaaaaaccatttccaaaggtttttttggtcaaatatactgcagattaatgaagataattctcctttgtaaaattagctatgtggacacatacccttgtagggctgcgtttatctaatagtacttgaatgttgtatgttttcactgtcactgagtcaaacctggatgaaaaaaacctttaaatgttcgtctataccctaagtaaaatgaggacgaaagacaaa

SEQ ID NO: 7152 - DNA, 3425 bp, Homo sapiens
actgttgcaccgtgcaattgcacactataaatgtctttccttatctgtgtgtactcttatctcactgttctattttttctcctcatttatattaactctttcttacctttttttctgaacttctaggccttctctttccagaactggtggaagacaaatgaaacggccaagatggtaagaaacaagccgcatttctccttggggagactgataatttaaaaggtttgttgtgtcagaaacattcccagcttcatcaccaaccctttccttccacctctgcccactggagaccacttatatcccgaagcggacgcggcagctgaagtcaggaaaccatgcatcacattagcaggagccaactgcagactttaaactccgttcaacatgtggatgcggcagagaaatgacctgtccagacaagccggggcagctcataaactggttcatctgctccctgtgcgtcccgcgggtgcgtaagctctggagcagccggcgtccaaggacccggagaaaccttctgctgggcactgcgtgtgccatctacttgggcttcctggtgagccaggtggggagggcctctctccagcatggacaggcggctgagaaggggccacatcgcagccgcgacaccgccgagccatccttccctgagatacccctggatggtaccctggcccctccagagtcccagggcaatgggtccactctgcagcccaatgtggtgtacattaccctacgctccaagcgcagcaagccggccaatatccgtggcaccgtgaagcccaagcgcaggaaaaagcatgcagtggcatcggctgccccagggcaggaggctttggtcggaccatcccttcagccgcaggaagcggcaagggaagctgatgctgtagcacctgggtacgctcagggagcaaacctggttaagattggagagcgaccctggaggttggtgcggggtccgggagtgcgagccgggggcccagacttcctgcagcccagctccagggagagcaacattaggatctacagcgagagcgccccctcctggctgagcaaagatgacatccgaagaatgcgactcttggcggacagcgcagtggcagggctccggcctgtgtcctctaggagcggagcccgtttgctggtgctggaggggggcgcacctggcgctgtgctccgctgtggccctagcccctgtgggcttctcaagcagcccttggacatgagtgaggtgtttgccttccacctagacaggatcctggggctcaacaggaccctgccgtctgtgagcaggaaagcagagttcatccaaggtaacagattcacatgcttcgttatttgcagctgttggggattctggttcattttcttttttccctcactctctttttctaaatgatttttctccacccacggttcacatttggacagcagcagcagcagcgtgtctttccatgcgcttggcattctttattttcccagcctgggaggatatgagagttccagggaaatgctgtattggacatgcaagagtaagcccatactgtataatctttgctctccatttccctcgcttcacttcccagtggcttattaaatctaattaaagccaacggcaatttgcatgatgaggagaggaagctaggctggaggcaaagaacttgctgacagtcaggcatactattaaataggttactatgggaggaagtagaagtttttaaaagtaagggggaagcgggttatcgttcttgagcagatggaatcttcttaagccgcgcagagccagaccatgttaggtttaaccccccctttttttttcaatggatttaacctctttatttaacaaataaaaagaatgagcaaaaattggtgatttgttcagtatgtatactaactagctgtgtggttttatcaagcccctgactatgatctattgagtctgtctttcaagattctcccgtcttgggtgacaaacattttggcaggttctaacacatgtagccagttactgcagttgccagcaaaaggactggtctgcggtcatgcccatgccatataaaggatattctctgaatattaaagctattccagggctcgaatacaaagtacagtgagtcagtggcttatgtttgaatgcagaatgatgccagaagttacaactttgaatccagattggcccaagaggctaaaatgtaccccaaagagattataagctgaaaggatacttaactttctccatgttaccatgaaatttagcatttcagtgaggttcccagggagcctagaatggaatggattaaaatccctgggagtggctgagacccaactgcatttccaatggctttagcattataatttcattttaaaatggatacccctggaagtaccagtgatttacttagaaaaattggacattccctactgatggtggttcttgtctaagtgctccagattcacaggtatgctttgatgtctcaagtttataaagcagtccaccacagttatgccaatgtaagaaaccttctcaaacatttaatctaatgttgataaaaatgaatttttattgggtgcccacaatttgctaaggattatacaaattgattcatatgtgttggctcctagaattttcataacaatgctatgaagtggggactattattatttccatttagtagatgagaaaattgaggcttattgagacaaagtaattggcctcaactcccacagctagtaggtggctaagctgggttttgactatagacccagcaaacttcagaacataacttcttagccactggacttaggtgaatatgtaacttattatccaaactggaaccgtgtggcgtgaaaggagatgctggtgggcattgggacaacaggcccacactgactgttctgagcagagtagagcacaggatcccccttgttatgctgaaatcccattcattttcatgtcataaaggccccagagaggagaagatgaactcctgtgtatatcctgaggcagagttctctgatatgtcctttgagcttcccttagacgctcttagactactgtattgggagaatgcagtagtggctaagagcctgggccgtggagttggactgactaggtttgaacttaccaatcatacgacttggaaatgttgccatgtctctttatgcctcagtttcctcagctgtaaaatgacaatactgcctaccatatgagattgttgttagttaatacagggaaaacacttagaaccagtatttgccacaagataaaccttcaataaatattggttattattattattattgtaccaagcacatgaggtaccaagttcattgaattcctcacataatctccaagtctcatgtgttacttcgttacgtgataggactatgactaaaactgctcaattaaacttttgtaatcccaa

SEQ ID NO: 7153 - DNA, 1410 bp, Homo sapiens
gccctgcacgtcggggcagcgggacagatcccagggtgcccagggagtctccaagtgcctcactcctcccgccgcaaacatgacagagaactccgacaaagttcccattgccctggtgggacctgatgacgtggaattctgcagccccccggcgtacgctacgctgacggtgaagccctccagccccgcgcggctgctcaaggtgggagccgtggtcctcatttcgggagctgtgctgctgctctttggggccatcggggccttctacttctggaaggggagcgacagtcacatttacaatgtccattacaccatgagtatcaatgggaaattacaagatgggtcaatggaaatagacgctgggaacaacttggagacctttaaaatgggaagtggagctgaagaagcaattgcagttaatgatttccagaatggcatcacaggaattcgttttgctggaggagagaagtgctacattaaagcgcaagtgaaggctcgtattcctgaggtgggcgccgtgaccaaacagagcatctcctccaaactggaaggcaagatcatgccagtcaaatatgaagaaaattctcttatctgggtggctgtagatcagcctgtgaaggacaacagcttcttgagttctaaggtgttagaactctgcggtgaccttcctattttctggcttaaaccaacctatccaaaagaaatccagagggaaagaagagaagtggtaagaaaaattgttccaactaccacaaaaagaccacacagtggaccacggagcaacccaggcgctggaagactgaataatgaaaccagacccagtgttcaagaggactcacaagccttcaatcctgataatccttatcatcagcaggaaggggaaagcatgacattcgaccctagactggatcacgaaggaatctgttgtatagaatgtaggcggagctacacccactgccagaagatctgtgaacccctggggggctattacccatggccttataattatcaaggctgccgttcggcctgcagagtcatcatgccatgtagctggtgggtggcccgtatcttgggcatggtgtgaaatcacttcatatatcatgtgctgtaaaataagaactagctgaagagacaaccaaagaagcattaaggcaggttgatgctgataggaccacaaaatatttttacactcaacctgagcggttattcttgacactcttaacagaattttttcaattgttttccagaactttagtatatgcaaatgtactgaaagggtagttcaagtctaaaatgccataacccctttattatttgttattttttatttgcattgctttgccataagtcttcccttgcttgtatcttccaaagctattttgaaataaacatgaaaatttacagtttgcc

SEQ ID NO: 7154 - DNA, 709 bp, Homo sapiens; identical to SEQ ID NO: 6531

SEQ ID NO: 7155 - DNA, 696 bp, Homo sapiens
gcacagatatgcaaagcagaaaccctcgtgcaggcccgaaagagaaagcgaaccagtatcgagaaccgagtgagaggcaacctggagaatttgttcctgcagtgcccgaaacccacactgcagcagatcagccacatcgcccagcagcttgggctcgagaaggatgtggtccgagtgtggttctgtaaccggcgccagaagggcaagcgatcaagcagcgactatgcacaacgagaggattttgaggctgctgggtctcctttctcagggggaccagtgtcctttcctctggccccagggccccattttggtaccccaggctatgggagccctcacttcactgcactgtactcctcggtccctttccctgagggggaagcctttccccctgtctctgtcaccactctgggctctcccatgcattcaaactgaggtgcctgcccttctaggaatgggggacagggggaggggaggagctagggaaagaaaacctggagtttgtgccagggtttttgggattaagttcttcattcactaaggaaggaattgggaacacaaagggtgggggcaggggagtttggggcaactggttggagggaaggtgaagttcaatgatgctcttgattttaatcccacatcatgtatcacttttttcttaaataaagaagcttgggacacagtagatagacacactta

SEQ ID NO: 7156 - DNA, 274 bp, Homo sapiens
gttcttcattcctttactgatgccatctttgatgagtggatgaaaagatttaatcctcctgcagatgcctggcctcaggagctggcccctattggtcacaatcggatgtacaacatggttcctttcttccctccagtgactaatgaagaactctttttaacctcagaccaacttggctacagctatgccatcgatctgccagatttccaggcaaatttcatctgctcatatctggtttctgtgcatcaggagtgagactgaagttctagggcgt

SEQ ID NO: 7157 - DNA, 4415 bp, Homo sapiens
gggtgcgccttcccggcgtctaggggagcgaaggctgaggtggcagcggcaggagagtccggccgcgacaggacgaactcccccactggaaaggattctgaaagaaatgaagtcagccctcagaaatgaagttgactgcctgctggctttctgttgactggcccggagctgtactgcaagacccttgtgagcttccctagtctaagagtaggatgtctgctgaagtcatccatcaggttgaagaagcacttgatacagatgagaaggagatgctgctctttttgtgccgggatgttgctatagatgtggttccacctaatgtcagggaccttctggatattttacgggaaagaggtaagctgtctgtcggggacttggctgaactgctctacagagtgaggcgatttgacctgctcaaacgtatcttgaagatggacagaaaagctgtggagacccacctgctcaggaaccctcaccttgtttcggactatagagtgctgatggcagagattggtgaggatttggataaatctgatgtgtcctcattaattttcctcatgaaggattacatgggccgaggcaagataagcaaggagaagagtttcttggaccttgtggttgagttggagaaactaaatctggttgccccagatcaactggatttattagaaaaatgcctaaagaacatccacagaatagacctgaagacaaaaatccagaagtacaagcagtctggtggatggaatggaacctggatgaccaaagcctcctttagcttgtggctagaaatcgcgtccctttatattcttcatatcccagatctgccaactccattgccctgtatattcatgatctctgcaaaatgctgccaagcagttcttaacatttcagtcttcaagaaagaatctgggatctgcacaggctggcagagctatggacattcaggggttttgcatgtatgctgaaccctactgccttgctctggtatttggcctcacaaccactgtccaacttcgggtgatgtcacttgggtctcataccttccttgcatgtgtcccaagtttcacaaaacctccttatggaaaagagcacattcgatttcttccttgataaaagggaccagattcacattggccttctgctttacttgcattcctcattgtcttttagactcagcctcagcttgggctttgttagcaagttcactgccaccatagcatcacagcctaaagggcatggctgagactcattgatctatagagcactcttttaccccaacatactctaaatgactgatcaaagatcaaaaacagaagagcatttatactccattcttgttttttgagacctgcttgatttattccgattatttaacacacagggacgcaacagtgatcccaaagtgtgtaaagttaaagccttcaactgcagctgaggagagggcaggaatggggacggtggtgagtcaggaatgacaggcaggcagccatgaccagggcagcctcctccccagggccagggactggggagtggcctaaggagcaggacctaagggtagcccagagctggggaagggggcagagacctccccttggcctaggtctggagctcagaagtgccacatgcctgagggggcagcggcctgggaagggccagaggcagggtcaggagagcaccatttcctggggggctggggacagggaggtgccctataggagaagccaggaggggccgtctgcccctgaggtgggggctgggctggagcaggctgcagcaagaaagacctgaggcaggcacagggcctgagagcccagctgcctgggttcaggggggctcccagggcagcctggcccagggagcagtcctgactctgcaggggatgcccagcaaggggggctgcagacccctcagagcctcccctcctctctccctggaaaggagctggggaacccatagtgcaaatctgtggaccactcagttatggagggaggctgtgcctgaaggtggacactggggtgcactccctccaccatctcgccctgcaccgctgtcctcagtacagccacttctcgtaagagtgcaggccatggatgccaccgtcgatctgggctgacatggtctgcttctcaaacttgagctcccctgagtacatcatggaccgaaggacagacaggctgtgggccccgatatcctggcagccatgctggatgcccactatgaggtagggcacgaacttctgaatggaccctttgtcctggatggagcccaagacatcctgcgtgatcttcgccttatccccgtcgttgaagtattgtttctggctgctgctgctcttctccatggcatccagtgagcccatgccctggtacttcttgagctgcattccgtctgagaagaagcactcgccgggggcctccatggtggcggccagcagggagcccatcatcactgtggaggctcctagggccagggccttgaccacatgccccatggtctggatgccaccatcggctatgatgggcacaccaaagttctgggtatgcttggccaccttgtacacagcagtgccctggggctgactgcaggctatcacttcctggttgatgtagatggagccgcgcagtccatgcccctgcccagcccatccacaccagcgtcaatcaggttgttggcctgggctgctgtcaccacgttccccccaatcacctggaggtggggttacttttgtttgatgtaatgcaccatggcgatctgatacaccgagttcccttgggacgagtccaagcctatgacattgacgcctacctgggtgagcaggtccaggtggtatttgtcatcctcatgggtacccacagctgccccgcccagcagctgctcatgggaatccttggaggccacagggtagtctcggttcttcagcgcggtgcaggtgataatggccaccagctcatcgcgatcattgacgataggcagcttcctttcttactaagctgcaggatctcatttgcctctttcaacctcacactgctggagccaccactagcttgatccttggcatcatcacctcactgaggagggtggtgtggtccttctcagcaagaaagtcgatgtctcgggaggtgacgatgcccaccagcttgctgcccatggtacccgtctcagtgatggggatgccagagaagccatgacgcatcttggcctccaacacatcacccacagtgtgcaaggggctcagcaccacggggtgtgtgataaagcccggttcaaacttcttgaccttctgcacctcactggcctggaactctggggtgcagttgtggtgaatgaaaccagtacctcccatcagagccatcacgatggccaggtcggcctctgtcacagtgtccatgggggaggagatcagcggcgtcttcagagtgaccattgggtcagggctgaggtcaggtccacctcatcagctatgaagtctatgaatcctgggagaatcaagaagtcgttgtaggtgagtccctggtcactggcgaagagctgctgcacggtgtggggaaaagaaagagagatcagattgttactgtgtctgtgtagaaagaagtagacataggagactccattttgttctgtactaagaaaaattcttctgcctcgagatgctgttaatctgtaaccttacccccaaccctgtgctccctgaaacatgtgctatgtcaactcagggttaagtggattaagggctgtgcaagatgtgctttgttaaacagatgcttgaaggcagcgtgctcgttaagagtcatcaccactccctaatctcaagtacccagggacacaaacactgcggaaggccgcagggacctctgcctaggaaagccaggtattgtccaaggtttctccccatgtgatagtctgaaatatggcctcatgggaagggaaagacctgaccgtcccccagcccgacacccataaagggtctgtgctgaggaggattagtaaaagaggaaggaacgcctgtttgcagttgagagaagaggaaggcatctgtctcctgccagtccctgggcaatggaatgtctcggtgtaaaacctgattgtatgttccatctgctgagataggggaaaaccgccttagggctggaggtgggacatgcgggcagcactactgctctttaagtcattgagatgtttatgtgtatgcatatctgaagcacagcacttaattctttaccttgttcttgatgcagagacctttgttcacgtgtttatctgctgaccttctctccactattattctatgaccctgccacacccccctctccgagaaacacctaaaaatgatcaataaatactaagggaactaagaggccggcgggatcctccgtatgctgaacgccggtcccctgggcccccttttttctttctct

SEQ ID NO: 7158 - DNA, 1996 bp, Homo sapiens
cttttactgctggctgggaaggaggagcatcagaccacagatcctggaaggcacttctctccctgactgctgctcacactgccgtgagaacctgcttatatccaggaccaaggaggcaatgccaggaagctggtgaagggtttcctctcctccaccatggttgacagcactgagtatgaagtggcctcccagcctgaggtggaaacctcccctttgggtgatggggccagcccagggccggagcaggtgaagctgaagaaggagatatacagtgcctcctttggtctctctctggtcatctgggctgtcgggggcctcttctccgtctttggggccctttgttatgcggaactgggcaccaccattaagaaatctggggccagctatgcctatatcctggaggcctttggaggattccttgctttcatcagactctggacctccctgctcatcattgagcccaccagccaggccatcattgccatcacctttgccaactacatggtacagcctctcttcccgagctgcttcgccccttatgctgccagccgcctgctggctgctgcctgcatttgtctcttaaccttcattaactgtgcctatgtcaaatggggaaccctggtacaagatattttcacctatgctaaagtattggcactgatcgcggtcatcgttgcaggcattgttagacttggccagggagcctctactcattttgagaattcctttgagggttcatcatttgcagtgggtgacattgccctggcactgtactcagctctgttctcctactcaggctgggacaccctcaactatgtcactgaagagatcaagaatcctgagaggaacctgcccctctccattggcatctccatgcccattgtcaccatcatctatatcttgaccaatgtggcctattatactgtgctagacatgagagacatcttggccagtgatgctgttgctgtgacttttgcagatcagatatttggaatatttaactggataattccactgtcagttgcattatcctgttttggtggcctcaatgcctccattgtggctgcttctaggcttttctttgtgggctcaagagaaggccatctccctgatgccatctgcatgatccatgttgagcggttcacaccagtgccttctctgctcttcaatggtatcatggcattgatctacttgtgcgtggaagacatcttccagctcattaactactacagcttcagctactggttctttgtggggctttctattgtgggtcagctttatctgcgctggaaggagcctgatcgacctcgtcccctcaagctcagcgttttcttcccgattgtcttctgcctctgcaccatcttcctggtggctgttccactttacagtgatactatcaactccctcatcggcattgccattgccctctcaggcctgcccttttacttcctcatcatcagagtgccagaacataagcgaccgctttacctccgaaggatcgtggggtctgccacaaggtacctccaggtcctgtgtatgtcagttgctgcagaaatggatttggaagatggaggagagatgcccaagcaacgggatcccaaatctaactaaacaccatctggaatcctgatgtggaaagcaggggtttctggtctactggctagagctaaggaagttgaaaaggaaagctcacttctttggaggcacctgtccagaagcctggcctaggcagcttcaacctttgaacttactttttgaaatgaaaagtaatttatttgttttgctacatactgttccagacttttaaaggggacaatgaaggtgactgtggggaggagcatgtcaggtttgggcttggttgttttagaagcacctgggtgtgcctacctactcctcttttcttttaaaagggcccacaatgctccaatttcctgtctcctttagagagacatgaaactatcacaggtgctggatgacaataaaagtttatgttcct

SEQ ID NO: 7159 - DNA, 583 bp, Homo sapiens
atttgcaaaggaaacattgaggctgacgagaggagagttggagactgcagaacttgggagctgtccactgctctgcctttgtcacagcccagagcaatgctaagaagacgtttggtttaaagaattaaaaggaagaacaacttaagagcttcttcaaagtttcccgcatgaaaattacttaaacgttgcacacaacgtttcacaaaatcttttgtgaaagaagaaaaggaaattcagtgtgtgagtctcagcaggagttaagctaatgcagcttaaaataatgccgaaaaagaagcgcttatctgcgggcagagtgcccctgattctcttcctgtgccagatgattagtgcactggaagtacctcttgatctggtacagcctccaaccatcacccaacagtctccaaaagattacattattgaccctcgggagaatattgtaatccagtgtgaagccaaagggaaaccgcccccaagcttttcctggacccgtaatgggactcattttgacatcgataaagaccctctggtcaccatgaagcctggcacaggaacgctcataattaacatcatgagcgaaggg

SEQ ID NO: 7160 - DNA, 3353 bp, Homo sapiens
gtcacatgagccgcgcgcccgcttcgctccccctcctccccggctgggctgtgtgaatgaagctctgccggctacgtggggcgctcactcaacttggtgtcctggacgccagagccgaccgagcgcgctgcccaccggcggcggacacgggctccgccgctccggacctcggcgacagagcaaatcagttgcctggagttcccagtgaagttgtacctgtgcccgtgcgataacgtcagtggaagctgccccgagtaagtgagggaaatctagaagtttggagcataaaaaaccagcacgaatcaactttacataaacttcatacatttattagcaactgctcgggtttaacttcagggatgttaaatttcgcctagtcccacgggacgatgatcattacttcttaactgcacgcgaaataggagaagaaaaaaggcaaatcaaaacagactgtcccaggtctcagagaagtcatcggagcgctttttcctgctgaattcaccctaggagtttgtttggggctttagccccttggagaaaacagggccacatagctgcctttctatcaagtctccctacaaaactgagaggctctgggaaactcagcctgtgaccccagcgtgggtgaagataggatcaagatggccatgtggcagggtgccatggataacagaggctttcagcaggggagttttagtagcttccagaacagctccagtgatgaagacctgatggacattccagcaaccgctatggatttctccatgagagatgatgttcctcccttagaccgagaagtaggagaggacaagtcgtacaatggtggaggaataggttcttcaaataggatcatggacttcttggaggagccaatccctggtgtagggacctatgatgatttcaatacaattgattgggtgagagagaagtctcgagaccgggataggcaccgagagattaccaataaaagcaaagagtcaacatgggccttaattcacagtgtgagtgatgctttttccggctggttgttgatgctccttattgggcttttatcaggttcgttagctggtttgatagacatctctgctcattggatgacagacttaaaagaaggtatatgcacagggggattctggtttaaccatgaacattgttgctggaactctgagcatgtcacctttgaagagagacaaatgtccagagtggaatagttggtcccagcttatcatcagcacagatgagggagcctttgcctacatagtcaattatttcatgtacgtcctctgggctctcctatttgccttccttgccgtatctcttgtcaaggtgtttgcgccttatgcctgtggctctggaatccctgagataaaaactatcttgagtggtttcattattaggggctatttgggtaagtggactctggttatcaaaaccatcaccttggtgctggcagtgtcgtctggcttgagcctgggcaaagagggccctctagtgcacgtggcttgctgctgtgggaacatcctgtgccactgcttcaacaaatacaggaagaatgaagccaagcgcagagaggtcttgtcggctgcagcagcagctggtgtatctgtagcctttggagcacctataggtggagtattattcagccttgaagaggtcagctactattttcccctcaaaacattgtggcgttcattctttgctgccttggtggcagcattcactctacgctccatcaatccatttgggaacagccgcctggtactattttatgtggagtttcacaccccatggcatctctttgagctcgtgccattcattctgctgggcatatttggtggtctgtggggagcactgtttatccgcacaaacattgcctggtgtcggaagcgaaagaccacccagttgggcaagtatcctgttatagaggtactcgtcgtgacagccatcactgccatcctggctttccccaatgaatacactcggatgagcacaagtgagctcatttctgagctgtttaatgactgtggccttctggactcctccaagctctgtgattatgagaaccgtttcaacacaagcaaagggggtgaactgcctgacagaccggctggcgtgggagtctacagtgcaatgtggcagctggctttaacactcatactgaaaattgtcattactatattcacctttggcatgaagatcccttctggcctctttatccctagcatggctgttggtgctatagcaggtcgacttctaggagtaggaatggaacagctggcttattaccaccaggaatggaccgtcttcaatagctggtgtagtcagggagctgattgcatcacccccggcctttatgcaatggttggggctgcagcctgcttaggtggggtgactcggatgactgtttctcttgttgtcataatgtttgaactgactggtggcttagaatacatcgtgcctctgatggctgcagccatgacaagcaagtgggtggcagatgctcttgggcgggagggcatctatgatgcccacatccgtctcaatggatacccctttcttgaagccaaagaagagtttgctcataagaccctggcaatggatgtgatgaaaccccggagaaatgatcctttgttgactgtccttactcaggacagtatgactgtggaagatgtagagaccataatcagtgaaaccacttacagtggcttcccagtggtggtatcccgggagtcccaaagacttgtgggctttgtcctccgaagagatctcattatttcaattgaaaatgctcgaaagaaacaggatggggttgttagcacttccatcatttatttcacggagcattctcctccattgccaccatacactccacccactctaaagcttcggaacatcctcgatctcagccccttcactgtgactgaccttacacccatggagatcgtagtggatattttccgaaagctgggactgcggcagtgcctggttacacacaacgggcgattgcttggaatcattaccaaaaaggatgtgttaaagcatatagcacagatggcgaaccaagatcctgattccattctcttcaactagaatcatagagttctggatgtaaagcgggaaggacattacagaccatggatatgttgtattaactgggtacccaaaacacattttccatatttggatggtgaagtcacattagtgtgttgtctctttcctacaagttaaccagttgcactacataatctctggaaattaattttctctttaggagaaattatagttaggcttccatgatgttacattaggaagatatcatgaaagaataaataagattgctatggtttaattat

SEQ ID NO: 7161 - DNA, 844 bp, Homo sapiens
gcggttgcggttagtggaccgggaccggtaggggtgctgttgccatcatggctgaccccgacccccggtaccctcgctcctcgatcgaggacgacttcaactatggcagcagcgtggcctccgccaccgtgcacatccgaatggcctttctgagaaaagtctacagcattctttctctgcaggttctcttaactacagtgacttcaacagtttttttatactttgagtctgtacggacatttgtacatgagagtcctgccttaattttgctgtttgccctcggatctctgggtttgatttttgcgttgattttaaacagacataagtatccccttaacctgtacctactttttggatttacgctgttggaagctctgactgtggcagttgttgttactttctatgatgtatatattattctgcaagctttcatactgactactacagtattttttggtttgactgtgtatactctacaatctaagaaggatttcagcaaatttggagcaggttttttttttatagtgagataatggagttggtcttagccgctgcaggagcccttcttttctgtggattcatcatctatgacacacactcactgatgcataaactgtcacctgaagagtacgtattagctgccatcagcctctacttggatatcatcaatctattcctgcacctgttacggtttctggaagcagttaataaaaagtaattaaaagtatctcagctcaactgaagaacaacaaaaaaaatttaatgagaaaaaaggattaaagtaattggaagcagtatatagaaactgtttcattaagtaataaagtttgaaacaatgattaaa

SEQ ID NO: 7162 - DNA, 8946 bp, Homo sapiens
ggcgaggggcctcagcgcgcctggcgctggactgagcgctccctttctccgccgcgcccgggctgggctctcacgcccgtctctgctcgcgcccgcagccgcctggtgcactatcctcagaggcggcaccgcgggggtgtctgcagcctcggcctccgcccggcccctccctccctccctccctccctcgctccttccctgcctccctcaccacgtaggagttcggattctccacccgaatcgtcctgatttcccttctcctctcttttggaaaccggagaggtggagggagggcaacaccgctgcaaaggagaggcccgccaagtctgcccgcctgcaaagtgttgctttgacacattcttattatggaagttaagtaaaaatatagacatattaaaaaataactccggacgtggagctgctacggagaaggaaaccgggggaaagaaaaccagtaggcaggccaatggtttttcggcagcgcgctggcaagtttgtggaacactttctaggaattaggtcttttcctcccccttcatcatcttgacttctgaaggaagaacttggctttggattgcagtggagcctaaggagagagggttagacacactcgaataatccctctggctgggctgaatttgtgggaatttaggaagccagagtgctggaaatacagcagcctttgaagtaccctctgttaatttggatggatctcagtgtgccccgttcgagacctctccaccaaccccttctgatcttgcgatttgctcttcttgactttaattagtatctaggaaagtctaaactttggacctacctctttttttgatactcatttttgtacttttgctctctgggattggtttcttaaagaatctggatcctttttaatatgtcaaaatgagtctgctgatgtttacacaactactgctctgtggatttttatatgttcgggttgatggatcgcgtcttcgccaggaggactttcccccgcggattgtggagcatccttccgatgtcatcgtctctaagggcgagcccacgactctgaactgcaaggcggagggccggccaacgcccaccattgagtggtacaaagatggggagcgagtggagactgacaaggacgatccccggtcccacaggatgcttctgcccagcggatccttattcttcttgcgcatcgtgcacgggcgcaggagtaaacctgatgaaggaagctacgtttgtgttgcgaggaactatcttggtgaagcagtgagtcgaaatgcgtctctggaagtggcattgttacgagatgacttccgacaaaaccccacagatgttgtagtggcagctggagagcctgcaatcctggagtgccagcctccccggggacacccagaacccaccatctactggaaaaaagacaaagttcgaattgatgacaaggaagaaagaataagtatccgtggtggaaaactgatgatctccaataccaggaaaagtgatgcagggatgtatacttgtgttggtaccaatatggtgggagaaagggacagtgacccagcagagctgactgtctttgaacgacccacatttctcaggaggccaattaaccaggtggtactggaggaagaagctgtagaatttcgttgtcaagtccaaggagatcctcaaccaactgtgaggtggaaaaaggatgatgcagacttgccaagaggaaggtatgacatcaaagacgattacacactaagaattaaaaagaccatgagtacagatgaaggcacctatatgtgtattgctgagaatcgggttggaaaaatggaagcctctgctacactcaccgtccgagctcccccacagtttgtggttcggccaagagatcagattgttgctcaaggtcgaacagtgacatttccctgtgaaactaaaggaaacccacagccagctgttttttggcagaaagaaggcagccagaacctacttttcccaaaccaaccccagcagcccaacagtagatgctcagtgtcaccaactggagacctcacaatcaccaacattcaacgttccgacgcgggttactacatctgccaggctttaactgtggcaggaagcattttagcaaaagctcaactggaggttactgatgttttgacagatagacctccacctataattctacaaggcccagccaaccaaacgctggcagtggatggtacagcgttactgaaatgtaaagccactggtgatcctcttcctgtaattagctggttaaaggagggatttacttttccgggtagagatccaagagcaacaattcaagagcaaggcacactgcagattaagaatttacggatttctgatactggcacttatacttgtgtggctacaagttcaagtggagagacttcctggagtgcagtgctggatgtgacagagtctggagcaacaatcagtaaaaactatgatttaagtgacctgccagggccaccatccaaaccgcaggtcactgatgttactaagaacagtgtcaccttgtcctggcagccaggtacccctggaacccttccagcaagtgcatatatcattgaggctttcagccaatcagtgagcaacagctggcagaccgtggcaaaccatgtaaagaccaccctctatactgtaagaggactgcggcccaatacaatctacttattcatggtcagagcgatcaacccccaaggtctcagtgacccaagtcccatgtcagatcctgtgcgcacacaagatatcagcccaccagcacaaggagtggaccacaggcaagtgcagaaagagctaggagatgtccttgtccgtcttcataatccagttgtgctgactcccaccacggttcaggtcacatggacggttgatcgccaaccccagtttatccaaggctaccgagtgatgtatcgtcagacttcaggtctgcaggcgacatcttcgtggcagaatttagatgccaaagtcccgactgaacgaagtgctgtcttagtcaacctgaaaaagggggtgacttatgaaattaaagtacggccatattttaatgagttccaaggaatggatagtgaatctaaaacggttcgtactactgaagaagccccaagtgccccaccacagtctgtcactgtactgacagttggaagctacaatagcacaagtattagtgtttcctgggatcctcctcctccagatcaccagaatggaattatccaagaatacaagatctggtgtctaggaaatgaaacgcgattccatatcaacaaaactgtggatgcagccattcggtccgtaataattggtggattattcccaggtattcaataccgggtagaggttgcagctagtaccagtgcaggggttggagtaaagagtgagccacagccaataataatcgggagacgcaatgaagttgtcattactgaaaacaataacagcataactgagcaaatcactgatgtggtgaagcaaccagcctttatagctggtattggtggtgcctgctgggtaattctgatgggttttagcatatggttgtattggcgaagaaagaagaggaagggactcagtaattatgctgttacgtttcaaagaggagatggaggactaatgagcaatggaagccgtccaggtcttctcaatgctggtgatcccagctatccatggcttgctgattcttggccagccacgagcttgccagtaaataatagcaacagtggcccaaatgagattggaaattttggccgtggagatgtgctgccaccagttccaggccaaggggataaaacagcaacgatgctctcagatggagccatttatagtagcattgacttcactaccaaaaccagttacaacagttccagccaaataacacaggctaccccatatgccacgacacagatcttgcattccaacagcatacatgaattggctgtcgatctgcctgatccacaatggaaaagctcaattcagcaaaaaacagatctgatgggatttggttattctctacctgatcagaacaaaggtaacaatggtgggaaaggtggaaaaaagaagaaaaataaaaactcttctaaaccacagaaaaacaatggatccacttgggccaatgtccctctacctccccccccagtccagccccttcctggcacggagctggaacactatgcagtggaacaacaagaaaatggctatgacagtgatagctggtgcccaccattgccagtacaaacttacttacaccaaggtctggaagatgaactggaagaagatgatgatagggtcccaacacctcctgttcgaggcgtggcttcttctcctgctatctcctttggacagcagtccactgcaactcttactccatccccacgggaagagatgcaacccatgctgcaggctcacctggatgagttgacaagagcctatcagtttgatatagcaaaacaaacatggcacattcaaagcaataatcaacctccacagcctccagttccaccgttaggttatgtgtctggagccttgatttctgatttggaaacggatgttgcagatgatgatgccgacgacgaagaggaagctttagaaatccccaggcccctgagagcactggaccagactcctggatccagcatggacaatctagacagctctgtgacaggaaaagcctttacctcctctcaaagacctcgacctaccagcccattttctactgacagtaacaccagtgcagccctgagtcaaagtcagaggcctcggcccactaaaaaacacaagggagggcggatggaccaacaaccagcattgcctcatcgaagggaaggaatgacagatgaggaggccttggtgccctatagcaagcccagtttcccatctccaggtggccacagctcatcaggaacagcttcttctaagggatccactggacctaggaaaaccgaggtgttgagagcaggccaccagcgcaatgccagcgaccttcttgacataggatatatgggctccaacagtcaaggacagtttacaggtgaattatagtaaatgagaggagacatacaaagctgctctgaaggaccatcaggtccggactcatggaagtgatgactctaaacagtgcaatgaacaatttatttatgtactattaaaagaactgtaaatgcaatgtaaagacacacagccacacatatcccacagatattttcattgtgttcttctcttaagtacaccacccaccttaactctttcttgtcaggagtatataaaaaagaaagaaaacaaaactcgccctacaggaagaaaaggattctcctctgtatataatttcttttgtgcattgctatgcaagctcactctttttagctctgctcatattattgtctgttcttattggtctgttgtactatatgtgaattaataggctgtggtgccatatattaacttttaattgtgtaacttttatgtttaaattttgcactgcaattttatttggtgataagcacaaatctctactcctcatgacatgaagaaaaagactgaatgtgaagggagtttctgtactgtaagctagattggataatgatggctgtaacaaatcatgttagatggttttcagttggggtgtagaaataggaagatgcaaaggaacaatggtgttggcaaagtcttctttgaatatcagggactgagtcaataaaaaaaatagtagaaaggtggcttttactattgacaaaagccggggtcaaaaaaagtagtttaagtcttaagactgaatatgcattaaagtatgcaggtagcaaagatgtaataaatttgcttaaaaaaagaaattaaagttttatttagaatcaattttacctgtcattgtaattgacccatctgagaattacaataagcaagaggaaattaaggtgttttgcaagagctgtatttatattacagttttttaaaaacattttctgaattatcgtaattaagctctccaactcgttaagtcagaatataatatgaagttccccaaggaaacgaacaaaatgaactctagaatatctagcaaatagttaaagaagcaatttattattagggcatactcgggctgtttccaaatataaactctattgcaatatcttatttcatctttctaatacatgtacagtgcacactagaggatagagctgcatcacttaaattcatgacttaaaaaataatacagtttatatacaacttgttttttatttgattaagaagtgaagtttacgccacccaatgtatagccaaattgtacgtgcttaaaaaacagtgccgagagtatgttcagttcgcagtaagtagatttattggaataaatattctatggtacattctcagaaattggcttccaactaaaatacgtttgacccattttgaataaggaaattgaaaagaaaaatttaaaaggagaaaaaaatgcatgtttataaactttttaaataaaaccagaccttgtaagtggacattaataattgtcctgcctcatttgttttcacgactttgacaacaagaagttcctgaacattagtcatgtatgctcagaataaatgtgactttgaaatatatgttagctactgtacatgtatagtcagtcaagtagaagaggaccttcctgaaattcccacttgtgacattttcccatgggtttcctacacaatcttaaattttatttctgtctatactttctcaaatttttcctatgataagttcagttgttggtactcttctaaaaatattcaacgtgattaggatcagttctaaaatacgggacccctttgagtgacaattcgcactccatgcattattggctcagtagccaatttttgtcacgtcgttataacaaggagatgacataattaaacatttccatcctttctattccctgagactgcatcagcacaggcaagtatagaatgtaatgttcttcatgggccccaccagctttttggtgccatgtaatttatttcttcgctgaagagaaaaagaattctgagacacagttattaaaccctttatcaactttctaccatcagtgcctgaattctaatgcagtgtgatttctctgggacaaagagactgaggaagatgaaaagtttcttcaaagagtgaatacatacttattcacaactctaggatgtgaggactttaaatatctctttatgaagttccctgcctaacctctttctatttaaaggcaaacaaatttcgaagaggttttgtgttccctctttatgtttctctatgacccagtttagtctaaaaccttagttcattacatatacaacacatagcctttgatccctggtaactggcaggtgttggtgattaataaaccaaggcttcaaagtgaagtatgtgtgtgcagatgacttttggaataacgtgggcatagcatcataccttcctgattgtcttcagcatataaaaattaactgttgtagttaaaattatgtcagtgcagagcttgtggttacttggaatgttctttcagaatagtccatgttgcctattaaacctagttttaaacacattgggcagtcaatttatgcacccaaaatatcaccctcaggtagattgagggcaagataaaatgctgtatgtagctatacaaaggaattcagaaacattactggaaagcaaagcctttgtcagcttgctactgacaaagtagtaaaaagctactaatcagtgttgagtcagatgtcaacagaaaaatacaaatacctatgagagccacagcagtttctcgtttcatagccgattcaatgaatatgattagaaattcactgagctcactcttgcaggtttaaatggaggcctgcataaggactgcaagaggaaatctgggtgggagagaatgtaatctgatcttgcactcataggcaatgctgcaatgcaatcatgtccaatacaagcacagcttcattcataacaggaaacgtcttctttgggaaaatagctctattggtgcccaaactcaggtatgccagtgtatgcaggtggagtcgccctacccctcttccaaacatgtcctgtgagatttttaaaataagatgggatagtacaggggcatgaaaagaattgattccttcacaggatttgaatccagttcaagggagaatgtagaaaattcaaaaccaacatataaggtatcacacaaccaagaaaagtaaaaccattgcaagtttacttgcgttgagtacaaaacagatttaatggtgttctatgtcatagtttaatgctctgggtatttaaatatgttttcaacaggatttgagttgaaagtttgtaatgtgctttgatggaacacctctcaatttctattcaataaacttatgtaattgtccattgacaatataatgataacagtaccattgaactctaaactgtggtttatcttcactactgggaagcaactgtgcatcagtattaaagatatgcagaaacataatattcactaatttgttcatctgcttctgtatattgtttatggaattacatggcaagaactgttctaaagcaacatgtctttccacattattttagaggtgaaattacttttgttttgcttctctataatgtgtacttcaaatgaaacaccatacttttttctaaaaaaagatgttcaatttactaatttttttaaatctcataatttaaaaagcatttgttgtgattttaaagtgttgcaagaaaagggattttgtggccgtgggtagactttttatactttgttttatagatggattttttttaactgtagtttgtttaagtcaccaagcagcatccaaaatcttaatgtgtttcatttgatgttgttagatcagagaagaaattggcataaaatcggttaatagtattgtcaaagaattgtgtattgtgtactcactgggaaaaaataaaatatattcacatttcaaa

SEQ ID NO: 7163 - DNA, 5253 bp, Homo sapiens; identical to SEQ ID NO: 610

SEQ ID NO: 7164 - DNA, 3725 bp, Homo sapiens
tttcagccaaccagactggagcagctgcgagtgctacatcttggctgtctgaagcgattggctcctctctggggagtggagggtgttcagttattaatgaccgctgagcaggcagcaccatgtcagtgtgacaactgatcgggtgaacgatgcaccactaaccaccatggaaacaaggaaaaataaagccagctcacaggatctctcttcactggattgagagcctcagcctgccgactgagaaaaagagttccaggaaaaagaaggaatcccggctgcagcctcctgccttcctttatattttaaaatagagagataagattgcgtgcatgtgtgcatatctatagtatatattttgtacactttgttacacagacacacaaatgcacctatttataccgggcaagaacacaaccatgtgattatctcaaccaaggaactgaggaatccagcacgcaaggacatcggaggtgggctagcactgaaactgcttttcaaggaggtgaagcattccacagataatcagctactctattcagggaaggagtgtaaacatcaccactttttgcatgtttgcataaaaaaggcccactgaatcagttaaagacgaggaagaggaggagaaagagaaagaagaggaagatgttgggcaacatttatttaacatgctccacagcccggaccctggcatcatgctgctattcctgcaaatactgaagaagcatgggatttaaatattttacttctaaataaatgaattactcaatctcctatgaccatctatacatactccaccttcaaaaagtacatcaatattatatcattaaggaaatagtaaccttctcttctccaatatgcatgacatttttggacaatgcaattgtggcactggcacttatttcagtgaagaaaaactttgtggttctatggcattcatcatttgacaaatgcaagcatcttccttatcaatcagctcctattgaacttactagcactgactgtggaatccttaagggcccattacatttctgaagaagaaagctaagatgaaggacatgccactccgaattcatgtgctacttggcctagctatcactacactagtacaagctgtagataaaaaagtggattgtccacggttatgtacgtgtgaaatcaggccttggtttacacccagatccatttatatggaagcatctacagtggattgtaatgatttaggtcttttaactttcccagccagattgccagctaacacacagattcttctcctacagactaacaatattgcaaaaattgaatactccacagactttccagtaaaccttactggcctggatttatctcaaaacaatttatcttcagtcaccaatattaatgtaaaaaagatgcctcagctcctttctgtgtacctagaggaaaacaaacttactgaactgcctgaaaaatgtctgtccgaactgagcaacttacaagaactctatattaatcacaacttgctttctacaatttcacctggagcctttattggcctacataatcttcttcgacttcatctcaattcaaatagattgcagatgatcaacagtaagtggtttgatgctcttccaaatctagagattctgatgattggggaaaatccaattatcagaatcaaagacatgaactttaagcctcttatcaatcttcgcagcctggttatagctggtataaacctcacagaaataccagataacgccttggttggactggaaaacttagaaagcatctctttttacgataacaggcttattaaagtaccccatgttgctcttcaaaaagttgtaaatctcaaatttttggatctaaataaaaatcctattaatagaatacgaaggggtgattttagcaatatgctacacttaaaagagttggggataaataatatgcctgagctgatttccatcgatagtcttgctgtggataacctgccagatttaagaaaaatagaagctactaacaaccctagattgtcttacattcaccccaatgcatttttcagactccccaagctggaatcactcatgctgaacagcaatgctctcagtgccctgtaccatggtaccattgagtctctgccaaacctcaaggaaatcagcatacacagtaaccccatcaggtgtgactgtgtcatccgttggatgaacatgaacaaaaccaacattcgattcatggagccagattcactgttttgcgtggacccacctgaattccaaggtcagaatgttcggcaagtgcatttcagggacatgatggaaatttgtctccctcttatagctcctgagagctttccttctaatctaaatgtagaagctgggagctatgtttcctttcactgtagagctactgcagaaccacagcctgaaatctactggataacaccttctggtcaaaaactcttgcctaataccctgacagacaagttctatgtccattctgagggaacactagatataaatggcgtaactcccaaagaagggggtttatatacttgtatagcaactaacctagttggcgctgacttgaagtctgttatgatcaaagtggatggatcttttccacaagataacaatggctctttgaatattaaaataagagatattcaggccaattcagttttggtgtcctggaaagcaagttctaaaattctcaaatctagtgttaaatggacagcctttgtcaagactgaaaattctcatgctgcgcaaagtgctcgaataccatctgatgtcaaggtatataatcttactcatctgaatccatcaactgagtataaaatttgtattgatattcccaccatctatcagaaaaacagaaaaaaatgtgtaaatgtcaccaccaaaggtttgcaccctgatcaaaaagagtatgaaaagaataataccacaacacttatggcctgtcttggaggccttctggggattattggtgtgatatgtcttatcagctgcctctctccagaaatgaactgtgatggtggacacagctatgtgaggaattacttacagaaaccaacctttgcattaggtgagctttatcctcctctgataaatctctgggaagcaggaaaagaaaaaagtacatcactgaaagtaaaagcaactgttataggtttaccaacaaatatgtcctaaaaaccaccaaggaaacctactccaaaaatgaacaaaaaaaaaaaaagcgaaagactgcagttgtgctaaaaacaaaacaaaacaaacaaacaaacaaaaaagtaaaaaaagattactttcgagagagaagtttaagcttcaccaatgctgctcctgaccaatggaaatatgtacaacttcagcattttaagtaactggcttcaaggggtactgtggcaaccaaataaaataactccattttctaaaactttcatgtaacttttatgtctggactacagttcaagtggacaaaaacatttctgtattttttttaagtaaataagagtagttgaactgagcaatacctcctcctgtgttgtattacacatattagccacgagtttttgcagtgaccagataaacttgaattgacacgtggtgtaataaaatggacaaattctgtagagtagacacagtgagtatgtggacctcttttataaggaaaaatacattttggattaaaatcaattgcttctgtcttgttttgtttctaaataaagaataatttctggg

SEQ ID NO: 7165 - DNA, 4592 bp, Homo sapiens
agcagcagttagcagcggcaacttgaggctgcaccccgggcaagtccccagggtggtgctcagccgagaggggggcttggcgccccgaaggggtgtgtgtagggtgggggcgaccacgtgggaccagctggtggccctggaaaacctcccacacacccacacccacacaccccttttgtgttgcaggctgcccctccaagagcggaggcagcgagagtacgcgtgtgcctcgcgccggtccacgcggggagagcactggggaccgagacccggcaccacctcccggtccgccctccagggaaaacgggaaaactagcaagagctagcaagaactagcaagagcttgaacaaacgcctggactcagattggaagactgctcatttgtctactgcctcattcctggaaattgcactggaactgtctgattaagcttcacctgaacctaaaatggtgagcgagagtcaccatgaggccctggcagccccgcctgtcaccactgtcgcgactgttctgccaagcaacgccacagagccagccagtcctggagaaggaaaggaagatgcattttctaagctgaaggagaagtttatgaatgagttgcataaaattccattgccaccgtgggccttaattgcaatagccatagtcgcagtccttttagtcctgacctgctgcttttgtatctgtaagaaatgtttgttcaaaaagaaaaacaagaagaagggaaaggaaaaaggagggaagaatgccattaacatgaaagatgtaaaagacttagggaagacgatgaaagatcaggatgatgatgctgaaactggattgacagatggagaagaaaaagaagaacccaaagaagaggagaaactgggaaaacttcagtattcactggattatgatttccaaaataaccagctgctggtagggatcattcaggctgccgaactgcccgccttggacatggggggcacatctgatccttacgtgaaagtgtttctgctacctgataagaagaagaaatttgagacaaaagtccaccgaaaaacccttaatcctgtcttcaatgagcaatttactttcaaggtaccatactcggaattgggtggcaaaaccctagtgatggctgtatatgattttgatcgtttctctaagcatgacatcattggagaatttaaagtccctatgaacacagtggattttggccatgtaactgaggaatggcgtgacctgcaaagtgctgagaaggaagagcaagagaaattgggtgatatctgcttctcccttcgctacgtacctactgctggtaagctgactgttgtcattctggaggcaaagaacctgaagaagatggatgtgggtggcttatccgatccttatgtgaagattcatctgatgcagaatggtaagaggctgaagaagaaaaagacaacaattaaaaagaacacacttaacccctactacaatgagtcattcagctttgaagtaccttttgaacaaatccagaaagtgcaggtggtggtaactgttttggactatgacaagattggcaagaacgatgccatcggcaaagtctttgtgggctacaacagcaccggcgcggagctgcgacactggtcagacatgctggccaaccccaggcgacctattgcccagtggcacaccctgcaggtagaggaggaagttgatgccatgctggccgtcaagaagtaaaggaaagaagaagcctttctgcatttgcccatatagtgctctttagccagtatctgtaaatacctcagtaatatgggtcctttcatttttccagccatgcattcctaacacaattcagtggtacttggaatcctgttttaatttgcacaaatttaaatgtagagagcccctaagtccttcatcataccactgccctccaaatctactcttcttttaagcaatatgatgtgtagatagagcatgaatgaaattatttattgtatcacactgttgtatataccagtatgctaaagatttatttctagtttgtgtatttgtatgttgtaagcgtttcctaatctgtgtatatctagatgtttttaataagatgttctattttaaactatgtaaattgactgagatataggagagctgataatatattatacggtaaatatagtatcgtctgcattccagcaaaaatatcaactcgtaaggcactagtacagttaaactgacatcttaaaggacaacttaaacctgagctttctattgaatcatttgagtaccaagataaacttacaccacatacttggtgggtgaatccaattttgtagaattcctacacaggcaaaatagcatgatctgagcagcagcatccaggctgacctcaaggaagcatagccacaaaacagaatagcacctgtctgtacatatttacaaagctaaaataatggcttcactcttatatttgaggaagcaactgaacaggagtcaatgatttcatattactgcatatagaataacaacaaggtgttccgtgtgtgtgtgtgtgtgtgtgtgtgtgtgtgtgtgcacatttgtttggggatgggggagaagaagctaaggggagaagtcaacatttatgaaatattgcctgactatttaaaaagaaaaaagtagctctccattatcacctttatacaaaatgtacatcctgtgaattctgttccagatttcacacctacaataattccaaaaggtttgcacattagagtttgtaacaaaatattttattatataaaaccaggttagaaggaatgcaggatatttttaacacaacaatctgtgcttattacacaaaattactttgtggtaaacagacagtattgtaatcccatcaaaagatgaaagaaaaacaaaaacaaaaaccaacaacaattagccatagttctgaatgcacttcaattaagccaaaacagacagctagtgatctttttatatgctctttttacttaagttttaatttgtcctttaaaaaaaggtgaaacaaaccaagaacaagttctagaaaactgaagcaacctcttatgtatactagatgcttgatttaggaggagtttttaaacgttttcaatgttattatgtagtaaatgacactattatgaagctactagtcattccataagagtcttaaaggactgctctgtgtaacactgtgactgccgtgtgtgcttagacccgtagtttcctcagtggatagcactcaatttattccgtagtgatattgtaacaatactgccattcccttctactgcactgcccaaggtgtgtgtagcacaaacagttctcattacaaaggaccaattcagaactgaaaagctatgcataggacaaggaagatacatagaatggggtggaacacagcattttgtcaagcactgtgcaatattccatatttttccccactatggtagacaaccatttcgtggaagggcagcctattatcccacactgcatctagccttttgtcccattcacttctgtgatccattttaatttccaggccacaagacagtagtgatgctctgaaatgaaagtttgtcttcacaaatatcaaaacaaaatggaggaaaactaagcattggcctcatgttcagtcttcaggatatcacaccacgtcttttcaaaaactaaagagaattcaaaaagggctgatggtaggctttgaacatggggttggctgtttcccagtaaaactggaattcctgtcgttactgtttccttatcaaagaaggggcaagctcttttgccttttaggccagacatagcaaacgctttataattggcatagacataaaggataaaaggaaaataaccgtctgccgatggtccgtacttcttaaaaaacataggtaatagaaaatatacacaagtcagaatgtgaaattaaataatggtttgaacagaaaattcaaacaagactctttccaatttaaagggccaaaccctaccaaagagagggagttgactggcttttaaaaagtatttaaataccacaaatgacatttaatttcactgtattcagctttaagttgttcacaatgaaaccacactttcaaacaagcaggttcaagctgctgaatagacattatttcttgcattaaaataccactaatgcattctcttgcaacactgccagacatgggattgtcaccatagaattagttggtactatgccatctttcactctttcacaagtcagtgatggaacctgctttatgaccaagattcatcctcaaataagccacatgtacccttctgacaaagctgtgtaaagtattagaatctgatgctctagaaagatcctagttgcctttgtgtatatttactgcctgcttgagtgtttctatgtgtgggttttccctgtatcttgtagaaatgttggggtgttttcctctgccatatggctcgtggcctgcgagccaactatttcagctgtattttaccttcatttttgatgaggtgatttaaattttgtttcactttgtgtagtgaattccacagtagttttctgattgttgttaaaaatgacttaacatattacacagatattcaataaaaatgttttatttcctgttga

SEQ ID NO: 7166 - DNA, 4685 bp, Homo sapiens
cagccgaacaattcgatgacgaggcccaggaagcacgctgaaaccctgggcggcggcaagctgtgcgacctcttctgcggccggcctgggcaggtgtcttcctcgagaggcaggcaggggatcccggacccttatacaggatgctgtgttctttgctcctttgtgaatgtctgttgctggtagctggttatgctcatgatgatgactggattgaccccacagacatgcttaactatgatgctgcttcaggaacaatgagaaaatctcaggcaaaatatggtatttcaggggaaaaggatgtcagtcctgacttgtcatgtgctgatgaaatatcagaatgttatcacaaacttgattctttaacttataagattgatgagtgtgaaaagaaaaagagggaagactatgaaagtcaaagcaatcctgtttttaggagatacttaaataagattttaattgaagctggaaagcttggactttttcatgattttgaaacatggaagtggcgattcgaagattcctttggagtggatccatataatgtgttaatggtacttctttgtctgctctgcatcgtggttttagtggctactgagctgtggacatatgtacgttggtacactcagttgagacgtgttttaatcatcagctttctgttcagtttgggatggaattggatgtatttatataagctagcttttgcacagcatcaggctgaagtcgccaagatggagccattaaacaatgtgtgtgccaaaaagatggactggactggaagtatctgggaatggtttagaagttcatggacctataaggatgacccatgccaaaaatactatgagctcttactagtcaaccctatttggttggtcccaccaacaaaggcacttgcagttacattcaccacatttgtaacggagccattgaagcatattggaaaaggaactggggaatttattaaagcactcatgaaggaaattccagcgctgcttcatcttccagtgctgataattatggcattagccatcctgagtttctgctatggtgctggaaaatcagttcatgtgctgagacatataggcggtcctgagagcgaacctccccaggcacttcggccacgggatagaagacggcaggaggaaattgattatagacctgatggtggagcaggtgatgccgatttccattataggggccaaatgggccccactgagcaaggcccttatgccaaaacgtatgagggtagaagagagattttgagagagagagatgttgacttgagatttcagactggcaacaagagccctgaagtgctccgggcatttgatgtaccagacgcagaggcacgagagcatcccacggtggtacccagtcataaatcacctgttttggatacaaagcccaaggagacaggtggaatcctgggggaaggcacaccgaaagaaagcagtactgaaagcagccagtcggccaagcctgtctctggccaagacacatcagggaatacagaaggttcacccgcagcggaaaaggcccagctcaagtctgaagccgcaggcagcccagaccaaggcagcacatacagccccgcaagaggtgtggctggaccacgtggacaggatccggtcagcagcccctgtggctagaggaacaccagcacaaacgacagcctcaagtctccttcgagctttatatccatttggggatgaagtctactttgacagctagcaaggcgacatgcaactgttgttgaatgatgacagcaattcaggaaagacttaaatatgaaagcaaattgaacacatcgggtgtttgttatcagaaaagagatgagatgagataagacttgtttattgactagccaatatgtcattaaaattaaggtttatattgtgaagcttttttgaaattttacttttttttgagagttttgctctgtcacccaggctggagtgaggtggtacaatctcggctcactgcaacctccacctcccaggttcaagagattctcctgcctcagtctcccgagtagctaggattacagatgtgcatcaccatgcctggctaatttttgtattttttagtagagatggggtttcaccatgttggtcaggctggtctcgaactcctgacctcaagtgacccgcccttgtcggcctcccaaagtgctgggattacaggcatgagccattgtgcccagcctatatagtgtgaagcttttaggaaaatcagaacagggtagacagctgttaaaaacaatgtttaaatggaataatgttgaatgtttacaggctgtaagaactattgtatacacaaaataatacacaaagtttgtactttgtgtacaaatacaaatttgtactttgtgtacaaataatacaaaaagtttgtatacacaaactttttacgttgtggtttggtatattgtcttaactgaattttcttataagaaccccatgaaacttacctgagtttttaaaatgctatccaggacatcataccttatagtatacatgaaacataatgtaatccaggttgtaatttagaactttttttttttttttagctgagcacttaatgtaattaattccaggttatgactcttaaaaaacattggccattagagaaatagttctatttgcccatccaaatcacctgaatgactttttgaaagaataggggtccacatccccagatcccatcccagctgtgcacagtctgaagcaagcagagtgaaacaagttggcaacttgttccaagcgtgggcctttgcagtctgtgatccagtgttactccaggtcccagtctgtcccatacttgtcttttgctacagttagttagttactttgttatcatccccttgtaaactgccttcaatatctgggataaggaagacaaagcttaatgacaactaaggttctagctgacatctttctttcatatttaatttttgtgagttttcatctgttttctgtttgtttatgtgtcctaggttcttgacctaaccacatgggttttgttttttgtttttatattagaacttagaaaagtttgttttacagcagtattatggaacagaagagaccattttaaataatttttttaaacagcccaaaacacacaaaagatacttgttttctagagacagggtcttgctctgtcacccaggctggagtgcagtggcacgatcatagctcagtgcagcctccacctcctgggctcaagtggtcctcctgcctcagcctcttaagcagttgggactacaggtgtgtgccagcatgcttgctgttttttttttttttgagacagagtcttgctctgtcactcaggctggagtccagtggcttggtctcagctcactgcaatctctgcctcccaggggttcaagtgattctcctgcctcagcctcccaagtagctgaaactacaggcgcatgccaccatgcccagctaatttttgtatttttagtagagacagggtttcactatgttggccaggctggtctcaaactcccgacctcaagtgatccgcccgcttcggcctcccaaagtgctgggattacaggtgtgagccactgcgcctggctgctgatttatttttcatagacacgggggtctatgttgcccaggttggtcttgaactcctagcctcaagcgatcctcctgcctcagcctcccaatgtgctgggattacaggaatgagccaccatgcccagcccaagaagtagagtttcttttatactgactttggcctaaaaaaacagattttcatggaggaaaaaaaaacctagatttttagtaagactattttatatacttttttacattgatcaagtacattatttttaccaaacaacattgtttcccactacatccatggttatgtataaaaaaacgccattgtcaattaagatgttaaaaaattatttccataagagtattaaattctaatctatgattcacttaacttcctactttataaacactaggtaaagtaatctcacaagctgccaaagaacacatcccaagcagtaatcacagacgatgaagcaccttacaggacccctccaccctcaaacgcgcatgtccagagaagtattaatgccttaatagactactgaaggttaactatttacatcattctaaaaatattttaagctgtattacagtgctataaattctccttttaaggaaaaaagtaatagattgtttccttaccgtgtttgaaaggaaaaaaaataaatccatagtaactaatggtctgccgattttttccctgaatttttaaactccaacaaagcattattttgcaaaaagtcctttagcccaaagtcagtgtctctgttttgatctctttgtaaaagaactctctgttcatccattctctttccctgggaccgtaaaataaggctgaaaaagtcttcatctggtactgtcggaccctttgtggtagcaggtggtggagcacatctttgatcatctaatctggatccctagaagtttatgagagagattaaaagacatactgtgggaaagaaagcaccaagctatgttaaatctctcagtcacaacaagaaaacgcagttgtaaacttttatttggggcttctcagaaattaatctttgtttttatattgttctctttagttcccagcctgatttctgaaagaaataatctttaaacctg

SEQ ID NO: 7167 - DNA, 935 bp, Homo sapiens
gtgaggatgtcagcgcctgtgtggccgcgggactcaaggctggcctggctcaagtgaacagcacgtccaggaggcgacctcgtccgcgggtttgcattctggggtggacgagctgggtccccggcctccgacgaataacttgggtgtggagtgtttgcccctgccagggggttcggtccgagcccggtgggaggctcccggagcgcagcctgggcccagcccaccccgcgccggcggccatggcaggcaccctggacctggacaagggctgcacggtggaggagctgctccgcgggtgcatcgaagccttcgatgactccgggaaggtgcgggacccgcagctggtgcgcatgttcctcatgatgcacccctggtacatcccctcctctcagctggcggccaagctgctccacatctaccaacaatcccggaaggacaactccaattccctgcaggtgaaaacgtgccacctggtcaggtactggatctccgccttcccagcggagtttgacttgaacccggagttggctgagcagatcaaggagctgaaggctctgctagaccaagaagggaaccgacggcacagcagcctaatcgacatagacagcgtccctacctacaagtggaagcggcaggtgactcagcggaaccctgtgggacagaaaaagcgcaagatgtccctgttgtttgaccacctggagcccatggagctggcggagcatctcacctacttggagtatcgctccttctgcaagatcctgtttcaggactatcacagtttcgtgactcatggctgcactgtggacaaccccgtcctggagcggttcatctccctcttcaacagcgtctcacagtgggtgcagctcatgatcctcagcaaacccacagccccgcagcgggccctggtcatcacacactttgtccacgtggcggag

SEQ ID NO: 7168 - DNA, 573 bp, Homo sapiens
ttaaatatacatacaatataacatgtttaatttatgctgaggcaggaggatttcttgagtctaggacttggagaccagcctgagcaacaaactgcaaagcatacgtgctatttccacactcttcttttgcagcagggcaggagccacacactcaaccactttgggttttttttttttttttcaccaaatggcatttcatgttaattagcttaattccacgtacagtggcttcctgccttccagagtgaggccgattttgctgctgttgagacatcctcacccatacacacacacacacacacacacacacacaccacacacacaaattaattttgtttcaaaaaggggcttcttatgtttctcagaatctgctctctggccagcgatgaagccccgtgctatatactctgagaatgagatacagaaatcagagaaacgcggccgctgcctttgcagaagacgcagatcaaaatctccacggggcgtctgcggaggacagcatgcaaatctcgctgggcaaacggtctgcttcgttgggtgatgcaatacaggaaaatcaacacacagcggcag

SEQ ID NO: 7169 - DNA, 3399 bp, Homo sapiens; identical to SEQ ID NO: 2415

SEQ ID NO: 7170 - DNA, 408 bp, Homo sapiens
cgctccaccacgccgtccacgtgcgccttgcggtctctccatttatcgcttgagatctccagccttaccgcggctcgaaatggaccccaactactcctgcaccactggtggctcctgcacgtgcgccggctcctgcaagtgcaaagagtgcaaatgcacctcctgcaagaagagctgctgcttctgctgccccatgggctgagccaagtgtgcccacggctgcatctgcaaagggacgtcggagaagtgcagctgctgtgcctgatgtgggaacagctcttctcccagatgttaatagaacaacctgcacaacctggattttttttttatacaatactgagccatttgctgcatttctttttatattaaatatgtgagtgacaataaaacaattttgacttgaatctt

SEQ ID NO: 7171 - DNA, 583 bp, Homo sapiens
agctgggacccactccgggcttggggacccggcgggcgggagaagcgggggctcccggcgcggcctggaaggagcgagaaagcaaaaggcatttttggtcgaagagagctgaagtaatgagaagacatcatggaggcccagtcccacagctccacgaccactgaaaagaaaaaagttgagaattccatagtgaagtgctccactcgaacagatgtgagcgagaaagccgttgcctccagcaccacttctaatggtgagcagcacagggattaccagcagcccagcctggagtcatttctgtgttctctgcattccttgtgaattgagcgtttgcacctggaccagtgtttgttctaggagacgctaaagaaagcaaatggagcaggggcggggggacggcggggggacatggaatgtagtaatctctattttggcactcaacctacacgttgacttccaaactttctaatttgagatgtaaatgtgataggttatttattatcagaagttcctgttttggcattttggaaatcatcttgactagtctggcaagagttcaaaatgctttgtgttgcatatggat

SEQ ID NO: 7172 - DNA, 587 bp, Homo sapiens
tcattgcggctggcgttcccaatacagacgcatcgtttcttttttaatactccctaagaaagggaataaccttcaagctggcgggagcaatggttcacataaagaaaggcgagctgacccaggaggagaaggagctactggaagtcatcgggaaaggcgtgccccacttccgcagtgctgagtcccagcggggagccccgaggacgagccagaagccatatttccccggagtccccgagtggacgtcccagaggagttccctgccgagtcccgttacctggcaggtgacatcagcgtgactgcatgcttcttctgcaccctcacggtgcagggatggtgatgcgtactgtccaagaagctggaacattattatccagcaagaatgttcgtgtcaactgtttggacgagaatggaatgactcctctaatgcatgcagcatataaaggaaaactcgatatgtgcaaattactactgcgacatggagccgatgtaaattgtcatcagcatgaacatggatacacagccctcatgtttgctgcactttctggtaataaagacatcacatgggtaatgttagaagctggtgc

SEQ ID NO: 7173 - DNA, 596 bp, Homo sapiens
caatgatgaccagtctgttcaagacccaagagggctgagattggcagccctggccattgtttaccacagcctaatgaagatgagtaaaagcctatctatccccaaggacctccacatatgacagtactcaactgagtctcacataggatagaataagataaaatgctggaagagaacacaaatagtgctacaaagcaggaagagagacttgatttggggatcaagacaagcttatagaagagacatcttgagagagaagatataatttcagaactcccccactggaaaggattctgaaagaaatgaagtcagccctcagaaatgaagttgactgcctgctggctttctgttgactggcccggagctgtactgcaagacccttgtgagcttccctagtctaagagtaggatgtctgctgaagtcatccatcaggttgaagaagcacttgatacagatgagaaggagatgctgctctttttgtgccgggatgttgctatagatgtggttccacctaatgtcagggaccttctggatattttacgggaaagaggtaagctgtctgtcggggacttggctgaactgctctacagagtgag

SEQ ID NO: 7174 - DNA, 4164 bp, Homo sapiens
cgcctaatcttcacccgctgctaggctcgtttaatgagtcttctgagagctaaggagtcctcggattcattcaaagcattctacaatgaacgctaggggggaaaaagaacaaacaaaatacatttcaaatataggattcaattacttttcactactcaatgatgtgtcaaaggcacgctgtgttttgttttgagggcggggagatgacaggagggaatcctgggcccccattggctcgccgctcgccgctgcagttgagctccagccgctccgagagcattattgatctgaagggtaaatgtggagggagccacagagaggggtccaggcttttctgagaagagaggcagcctcttccaggaagaaagtggtgtctactggctgcccggcctggagaaccttctttgaatgaaaacggacaaaatgcaaagcagtgtgttggcacagtgatttggaaaggggaaacagaagagaagggtctcaccttccgcgcaaggctgagctgttggcaccctgctgcggccgtcggtgctgctgctcctgcagctgccttttctgccatcagctttgttacctaacagcttggctcttttgggaaatatagacaagctggaacccaggagcagttgggagttttaaagaatgccagcctttttaaagctttgatgtccagtgctatagaatcaagttactgtggaggtcaaaacaatttgagatacataagctggccttagaaaataaattgcctctaacttacagtgaggagctcaacataacagggaaaaggagcacaggatgcagctacttggagggtgttgattgaaaacttcgatctccccaccccattcacggttgatttgacggatttctcacctcgttcacagagaaaatttcaattaaggcccctttagatggaatataatacagcagaagccttttcatcaaaaggattaatgcctgcatcatcatttctgcaataaaacaagaagctaagtggtggaggccacagacacctcaaacctggattccacaattctacgttaagtgttggagtttttattactctgctgtaggaaagcctttgccaatgcttacaaggaactgtttatccctgcttctctgggttctgtttgatggaggtctcctaacaccactacaaccacagccacagcagactttagccacagagccaagagaaaatgttatccatctgccaggacaacggtcacatttccaacgtgttaaacgtggctgggtatggaatcaattttttgtgctggaagaatacgtgggctccgagcctcagtatgtgggaaagctccattccgacttagacaagggagagggcactgtgaaatacaccctctcaggagatggcgctggcaccgtttttaccattgatgaaaccacaggggacattcatgcaataaggagcctagatagagaagagaaacctttctacactcttcgtgctcaggctgtggacatagaaaccagaaagcccctggagcctgaatcagaattcatcatcaaagtgcaggatattaatgataatgagccaaagtttttggatggaccttatgttgctactgttccagaaatgtctcctgtgggtgcatatgtactccaggtcaaggccacagatgcagatgacccgacctatggaaacagtgccagagtcgtttacagcattcttcagggacaaccttatttctctattgatcccaagacaggtgttattagaacagctttgccaaacatggacagagaagtcaaagaacaatatcaagtactcatccaagccaaggatatgggaggacagcttggaggattagccggaacaacaatagtcaacatcactctcaccgatgtcaatgacaatccacctcgattccccaaaagcatcttccacttgaaagttcctgagtcttcccctattggttcagctattggaagaataagagctgtggatcctgattttggacaaaatgcagaaattgaatacaatattgttccaggagatgggggaaatttgtttgacatcgtcacagatgaggatacacaagagggagtcatcaaattgaaaaagcctttagattttgaaacaaagaaggcatacactttcaaagttgaggcttccaaccttcaccttgaccaccggtttcactcggcgggccctttcaaagacacagctacggtgaagatcagcgtgctggacgtagatgagccaccggttttcagcaagccgctctacaccatggaggtttatgaagacactccggtagggaccatcattggcgctgtcactgctcaagacctggatgtaggcagcagtgctgttaggtacttcatagattggaagagtgatggggacagctactttacaatagatggaaatgaaggaaccatcgccactaatgaattactagacagagaaagcactgcgcagtataatttctccataattgcgagtaaagttagtaaccctttattgaccagcaaagtcaatatactgattaatgtcttagatgtaaatgaatttcctccagaaatatctgtgccatatgagacagccgtgtgtgaaaatgccaagccaggacagataattcagatagtcagtgctgcagaccgagatctttcacctgctgggcaacaattctcctttagattatcacctgaggctgctatcaaaccaaattttacagttcgtgacttcagaaacaacacagcggggattgaaacccgaagaaatggatacagccgcaggcagcaagagttgtatttcctccctgttgtaatagaagacagcagctaccctgtccagagcagcacaaacacaatgactattcgagtctgtagatgtgactctgatggcaccatcctgtcttgtaatgtggaagcaatttttctacctgtaggacttagcactggggcgttgattgcaattctactatgcattgttatactcttagccatagttgtactgtatgtagcactgcgaaggcagaagaaaaaagacaccctgatgacctctaaagaagacatcagagacaacgtcatccattacgatgatgaaggaggtggggaggaagatacccaggctttcgacatcggggctctgagaaacccaaaagtgattgaggagaacaaaattcgcagggatataaaaccagactctctctgtttacctcgtcagagaccacccatggaagataacacagacataagggatttcattcatcaaaggctacaggaaaatgatgtggatccaactgccccaccatacgattcactggccacatatgcctacgaagggagtgggtccgtggcagagtccctcagctctatagactctctcaccacagaagccgaccaggactatgactatctgacagactggggaccccgctttaaagtcttggcagacatgtttggcgaagaagagagttataaccctgataaagtcacttaagggagtcgtggaggctaaaatacaaccgagaggggagatttttaaaaaagaaaaagaaacacaaatattaatagaaatctctctcacacacacacacacacacaaacacacacacacacacacacactctgggacaagattcctttgattacctggtttctagtaagttactaaattaatcatattgtcagttttggtttattctgccaacaagagatacatcctataatgtgtacttgctttgttttgttgttttgttttttcacaatcacactgagacaagctcaggcctattcaatacaatttactgacatgacaacctagaacgaagatagctatgtggcatcacggtggaagagtgttagatttttcttaattccactaaagtgcctattgaaactcttatcatttaaagtggtgtacagtacactctgctgtgatggtattgcgggattcagagataaagacataaaacaaagacaccgtctttatgtcaagaagcaatagcgacactctgactctcctcattccttttgagaacaaaagaagaacactttctgatctccaccttcttctaattcaaaaggttttctttttcttttttaaactgtatgctaaaacgtatttgtttatcctatcctttcagaaaattgaaataaatatgaaaatatcaagttcaatatgtaagtccc

SEQ ID NO: 7175 - DNA, 910 bp, Homo sapiens
gcgatcggtccggtcggtggctccccgcggcggggccgggcccgatctcgggcgggaaccgagcgcagagccggtagcgggaaggatgaccacgctcacacgacaagacctcaactttggccaagtggtggccgatgtgctctgcgagttcctggaggtggctgtgcatctcatcctctacgtgcgcgaggtctaccccgtgggcatcttccagaaacgcaagaagtacaacgtgccggtccagaatgatgtggagaaagtggtggtggtgattttggataaagagcaccgcccagtggagaaattcgtctttgagatcacccagcctccactgctgtccatcagctcagactcgctgttgtctcatgtggagcagctgctccgggccttcatcctgaagatcagcgtgtgcgatgccgtcctggaccacaaccccccaggtgtgtccactccccaccctctcttcccttggcatttccatggttatctcgggttggtctgtgttcccaggtccatgtttggctgttctgagactcatctcttcctaaccctgagagtccacctcctctgggaagcttccctgattgattctacctggcttccatctccctattgactggggcttttcttagcacttgctttgccatctgctctgggggtgctgctgagccagcaagggaagtgggaagaggctgggcccagtggctggcaccagggcggtgggggagcctccaccaacctcttgcctctccaggctgtaccttcacagtcctggtgcacacgagagaagccgccactcgcaacatggagaagatccaggtcatcaaggtgagatgagatgggtctgggtctgggcgcaggctctagaaacgtgatgtcgcagttccaggcgggcaggggcactgcctgt

SEQ ID NO: 7176 - DNA, 672 bp, Homo sapiens; identical to SEQ ID NO: 3604

SEQ ID NO: 7177 - DNA, 536 bp, Homo sapiens
ccgagaggagtactggtatttccagcctcggcggctctcccggccgcagcgccctttgttgagaggattttttatcaagcagaaatgcatcgaacaacgagaatcaagatcactgagctaaatccccacctgatgtgtgtgctttgtggagggtacttcattgatgccacaaccataatagaatgtctacattccttctgtaaaacgtgtattgttcgttacctggagaccagcaagtattgtcctatttgtgatgtccaagttcacaagaccagaccactactgaatataaggtcagataaaactctccaagatattgtatacaaattagttccagggcttttcaaaaatgaaatgaagagaagaagggatttttatgcagctcatccttctgctgatgctgccaatggctctaatgaagatagaggagaggttgcagatgaagataagagaattataactgatgatgagataataagcttatccattgaattctttgaccagaacagattggatcggaaagtaaacaaagacaa

SEQ ID NO: 7178 - DNA, 574 bp, Homo sapiens
agagagaaaaagtaaaagaccgaagaaggaggctggagagaccaggatccttccagctgaacaaagtcagccacaaagcagactagccagccggctacaattggagtcagagtcccaaagacatggccttgaaagccatcccctgggtacaggtctttgtcttgaaagaaagcaacagtagaaatgccttccctgcccacagcacttcaggtctaaagaagaccaagtgaggacagtgacatgatcaggaagggtcacagcagccatggcttgttagagtgctgtgcaagatgtctggtaggggccccctttgcttccctggtggccactggattgtgtttctttggggtggcactgttctgtggctgtggacatgaagccctcactggcacagaaaagctaattgagacctatttctccaaaaactaccaagactatgagtatctcatcaatgtgatccatgccttccagtatgtcatctatggaactgcctctttcttcttcctttatggggccctcctgctggctgagggcttctacaccaccggcgcagtcaggcagatctttggcgact

SEQ ID NO: 7179 - DNA, 1679 bp, Homo sapiens
atactcagtcacacaagccatagcaggaaacagcgagcttgcagcctcaccgacgagtctcaactaaaagggactcccggagctaggggtggggactcggcctcacacagtgagtgccggctattggacttttgtccagtgacagctgagacaacaaggaccacgggaggaggtgtaggagagaagcgccgcgaacagcgatcgcccagcaccaagtccgcttccaggctttcggtttctttgcctccatcttgggtgcgccttcccggcgtctaggggagcgaaggctgaggtggcagcggcaggagagtccggccgcgacaggacgagtgctgatggcagagattggtgaggatttggataaatctgatgtgtcctcattaattttcctcatgaaggattacatgggccgaggcaagataagcaaggagaagagtttcttggaccttgtggttgagttggagaaactaaatctggttgccccagatcaactggatttattagaaaaatgcctaaagaacatccacagaatagacctgaagacaaaaatccagaagtacaagcagtctgttcaaggagcagggacaagttacaggaatgttctccaagcagcaatccaaaagagtctcaaggatccttcaaataacttcaggctccataatgggagaagtaaagaacaaagacttaaggaacagcttggcgctcaacaagaaccagtgaagaaatccattcaggaatcagaagcttttttgcctcagagcatacctgaagagagatacaagatgaagagcaagcccctaggaatctgcctgataatcgattgcattggcaatgagacagagcttcttcgagacaccttcacttccctgggctatgaagtccagaaattcttgcatctcagtatgcatggtatatcccagattcttggccaatttgcctgtatgcccgagcaccgagactacgacagctttgtgtgtgtcctggtgagccgaggaggctcccagagtgtgtatggtgtggatcagactcactcagggctccccctgcatcacatcaggaggatgttcatgggagattcatgcccttatctagcagggaagccaaagatgttttttattcagaactatgtggtgtcagagggccagctggaggacagcagcctcttggaggtggatgggccagcgatgaagaatgtggaattcaaggctcagaagcgagggctgtgcacagttcaccgagaagctgacttcttctggagcctgtgtactgcggacatgtccctgctggagcagtctcacagctcaccatccctgtacctgcagtgcctctcccagaaactgagacaagaaagaaaacgcccactcctggatcttcacattgaactcaatggctacatgtatgattggaacagcagagtttctgccaaggagaaatattatgtctggctgcagcacactctgagaaagaaacttatcctctcctacacataagaaaccaaaaggctgggcgtagtggctcacacctgtaatcccagcactttgggaggccaaggagggcagatcacttcaggtcaggagttcgagaccagcctggccaacatggtaaacgctgtccctagtaaaaatacaaaaattagctgggtgtgggtgtgggtacctgtattcccagttacttgggag

SEQ ID NO: 7180 - DNA, 1368 bp, Homo sapiens
atgaccaccagcggccacgcatgtccggtcccagcagtgaacggacacatgactcactatccagccacaccctacccgttactctttccacctgtcatcggaggactttccctgcctcccctccatggccttcatggacatccgcctccgagtggatgcagcaccccgtcgccggcaacaattgaaacacagagcaccagctctgaggaactcgtcccaagccccccatctccacttcctccccctcgagtgtacaaaccctgcttcgtctgccaggacaaatcatcagggtaccactatggggtcagcgcctgtgagggatgtaagggctttttccgcagaagtattcagaagaatatgatttacacttgtcaccgagataagaactgtgttattaataaagtcaccaggaatcgatgccaatactgtcgactccagaagtgctttgaagtgggaatgtccaaagaatctgtcaggaatgacaggaacaagaaaaagaaggagacttcgaagcaagaatgcacagagagctatgaaatgacagctgagttggacgatctcacagagaagatccgaaaagctcaccaggaaactttcccttcactctgccagctgggtaaatacaccacgaattccagtgctgaccatcgagtccgactggacctgggcctctgggacaaattcagtgaactggccaccaagtgcattattaagatcgtggagtttgctaaacgtctgcctggtttcactggcttgaccatcgcagaccaaattaccctgctgaaggccgcctgcctggacatcctgattcttagaatttgcaccaggtataccccagaacaagacaccatgactttctcagacggccttaccctaaatcgaactcagatgcacaatgctggatttggtcctctgactgaccttgtgttcacctttgccaaccagctcctgcctttggaaatggatgacacagaaacaggccttctcagtgccatctgcttaatctgtggagaccgccaggaccttgaggaaccgacaaaagtagataagctacaagaaccattgctggaagcactaaaaatttatatcagaaaaagacgacccagcaagcctcacatgtttccaaagatcttaatgaaaatcacagatctccgtagcatcagtgctaaaggtgcagagcgtgtaattaccttgaaaatggaaattcctggatcaatgccacctctcattcaagaaatgctggagaattctgaaggacatgaacccttgaccccaagttcaagtgggaacacagcagagcacagtcctagcatctcacccagctcagtggaaaacagtggggtcagtcagtcaccactcgtgcaataa

SEQ ID NO: 7181 - DNA, 684 bp, Homo sapiens
agtcaggctgtctgtcgttgggcttttcccacttccttctactacgtacttcttccctattcctcctactgaggccattaaacccttagttgtaattttccctgaacatgctttacattctgatgaattctgaaaaagaatgtggggtttccttgcagatgagttcatctgttgtttcatttcctttacaataactcccccactggaaaggattctgaaagaaatgaagtcagccctcagaaatgaagttgactgcctgctggctttctgttgactggcccggagctgtactgcaagacccttgtgagcttccctagtctaagagtaggatgtctgctgaagtcatccatcaggttgaagaagcacttgatacagatgagaaggagatgctgctctttttgtgccgggatgttgctatagatgtggttccacctaatgtcagggaccttctggatattttacgggaaagaggtaagctgtctgtcggggacttggctgaactgctctacagagtgaggcgatttgacctgctcaaacgtatcttgaagatggacagaaaagctgtggagacccacctgctcaggaaccctcaccttgtttcggactatagagtgctgatggcagagattggtgaggatttggataaatctgatgtgtcctcattaattttcctcatgaaggatt

SEQ ID NO: 7182 - DNA, 1035 bp, Homo sapiens
atgctggaggttcgctagccgaagcggctgcatctggcgccgcgtctgccccgcgtgctcggagcggattctgcccgccgtccccggagccctcggcgccccgctgagcccgcgatcacttcctccctgtgaccaaccggcgctgcaggttagagcctggcaatgccgtttgggtgtgtgactctgggcgacaagaagaactataaccagccatcggaggtgactgacagatatgatttgggacaggtcatcaagactgaggagttttgtgaaatcttccgggccaaggacaagacgacaggcaagctgcacacctgcaagaagttccagaagcgggacggccgcaaggtgcggaaagctgccaagaacgagataggcatcctcaagatggtgaagcatcccaacatcctacagctggtggatgtgtttgtgacccgcaaggagtactttatcttcctggagctggctactactcggagcgagacacaagcaacgtggtacggcaagtcctggaggccgtggcctatttgcactcactcaagatcgtgcacaggaatctcaagctggagaacctggtttactacaaccggctgaagaactcgaagattgtcatcagtgacttccatctggctaagctagaaaatggcctcatcaaggagccctgtgggacccccgagtatctggccccagaggtggtaggccggcagcggtatggacgccctgtggactgctgggccattggagtcatcatgtacatcctgctttcaggcaatccacctttctatgaggaggtggaagaagatgattatgagaaccatgataagaatctcttccgcaagatcctggctggtgactatgagtttgactctccatattgggatgatatttcgcaggcagccaaagacctggtcacaaggctgatggaggtggagcaagaccagcggatcactgcagaagaggccatctcccatgagtggatttctggcaatgctgcttctgataagaacatcaaggatggtgtctgtgcccagattg

SEQ ID NO: 7183 - DNA, 721 bp, Homo sapiens
gttagagttagaaggttcagtgttgatggagttattgaagaaatgatggagtaagagactcttttctaagcaactcaagtttgcagtgattcaggcctacttctgaagagacagccttttatctcaatgaatgacacagggtctgagattactgacatgcttcctgctatacccggcactgattccaaatgggactgggtctgcagaaaaaccagcagatactccctctgaggaagaggactttggtgatccaaggacatatgacccagatttcaaggggcctgttgccaacagactaaactgggaactccgtgagagaaagcatctcatctgtgtggttcaccaacgtttcatagcatctgccacagtatccggcacaaaataggagttgtacagatgttctgtgctgtatgatcttcctactgtgtattattggctacattgttttaggacttgtggcctgggtacatggggaccccagaagagcagcctatcctacagacagccagggccacttttgtggccagaagggcactcccaatgagaacaagaccattttgttttactttaacctgttacgctgtaccagtccctccgtgttgctaaacctacagtgccctaccacacagatctgtgtctccaagtgcccagaaaaatttttaacctatgtggaaatgcaacttttgtacacaaaagacaaaagctactgggaagactaccg

SEQ ID NO: 7184 - DNA, 942 bp, Homo sapiens
tctttttggcttgaggcctgaggccttgtcgagaagcttccgtgaaagggtgggccagccgggccacgagaaagaaagtgaataaatcaggaatataagtgggcggggggcccctgagaggggggtcgcaaagggtgagacatggccaccaggcgtttaaccgacgctttcttgttgttgcggaataattccatccaaaaccggcagctgttagccgagcaagagctggacgagcttgctgatgaccgtatggcactggtgtcaggcatcagcttagatccagaagcagcgattggtgtgacaaaacggccacctcctaagtgggtggatggagtggatgaaattcagtatgatgttggccggattaagcagaagatgaaagaattggccagccttcatgacaagcatttaaacagacccaccctggatgacagcagcgaagaggaacatgccattgagataactacccaagagatcactcaggcatgaagaatcgagaggaaagatcccagcattttttcgacacatcagtaccactaatggatgatggagacgataacactctttaccatcggggttttacagaggaccagttagttctggtggagcagaacacactgatggtggaagagcgggaacgagagattcgccagattgtacagtccatttctgacctgaatgaaatattcagggacttaggggcgatgattgtagaacagggtacagtccttgacagaattgactataacgttgaacagtcctgtatcaaaactgaagatggtttgaaacagcttcacaaggcagaacagtatcaaaagaagaatcggaagatgcttgtgattttaatattatttgtcatcatcattgtgctcattgttgtcctcgttggcgtgaagtctcgataagtggcattgggttttcgtgtgtgccgcgcgtgtggat

SEQ ID NO: 7185 - DNA, 3862 bp, Homo sapiens
ttggtttcatgaacggggccacatatttcgggaagcactcgggcattgtcaccagctatggcaagtgtcgctggtgtagtagcctctccagcatgggcggtgctggggctttacagaggaggctccggaagcctgttctggcaccactgggttcttgacctataatctatgctgagtactgaagattttcctatctactttccttccttctgtatgttcataatgccccaacaggctgtcattgcagtagacagggctttccgggacttagagctccgcttcacacatctggtatactgccctgttggcttgaacctctgaagagaggcagggtaggaacggtgactgctgtaaaggcacagacctgcacggccgggcgatacagactgagcaaagaaaagagtacccgttgaaggggtgtccactcttttggcttccctgggccacactggaagaagaagaattgtcttgggccacacatgaaatacactaacactaatgatagctgatgagcttaaaaaaaaaacacaaaatgttttaagaaagtttatgaatttgtgttgggctgcattcaaagccatcctgggccgcctgtagcccatgagctgtgggttgaacaagtttgcattagaaagtgaagaagtgggggcaagcccagtgtcatggcttgacactggaagccagtggaaggtgcccaggaagagttgtggggaatgtccttagactggcatcacacacccacgtgggatggaaggtgtcttccttttgtctcactcacggtggccctggccatctcctgccagcggtgctgaaacagggcctcctgcagagactgcatggctggtgactggccctggtgtcttgcagactatgatgcagtgctcacggaggctggagattacacagaaaaatatctgaagcttcaaaaactctttcaatctgtctcaggtactcagcacccatttaacttacgggccagccctcctcatgtggagtctctgttctgtggaaaagtgaggaaggcgtgggtctcccttgtgggcagcagttacaccaagctcctgagaacaagggcaaccttaacttcgaaccctggggttaaaatctgtgtgattttttaaaatcagggtttctaagcattttataagcctcagtttcttcactgaagcataaagatagtaaccttggtctcctgtgatgactgcgaagattgagttactctttgtaaagctcttataccatggatgacatagtaacccccaatatgaaaggaaaagccatgctggataggcatggggggcttagagaaggcagtggtcatctcaggcactttttgccctgtgccccatctccattgcagcaactcccctgccccgagtacccaaacttcctcccaaggctgtgtatccccccgtgagaccgtcgctgtacctcccgctgtgggacgccctatcctacttaaatgaggtgcgtgctgcctggccacaggaggcggagtggccattggagggatgggggagggattccttcaggaaactttttattaggaagtgggaaaacaaatcctctgcatttcattcaaatttagaactgtgggacaagagccaccagctccttccgggtggactgtgaaggggtttgaccttggagtcagtgtgcaggggaggggcagcaggacgtcggaggatcccgggttcccgcttagatgaacctgtctggagatgctcttgtttggactgtgtggtccttacggaatccacgtaggaaaagctgctgagctggaatcgggagactagcttctgcccgtgcttcaccagcagctgggcctgaacttcctgggtcactgctcccccttttccatcagccttcctgtcctattttgaagaaaggtgaaagctgtttggaactgaaactgtagcccttggattcacattggttttacctctgctatcactattttagagaaaaggtagtgactggtacactaaagaaactacatttatttaatgtaactaaatttaatttaatgaaataaacatttgcttggtgcctcattcattgctagacttcaactattttagaatacaatttatttactctttttttttcttgagacagggtcttgcttggtggctgtggctggaatgcggtggcacaatcatggctcactgcagccttgaactcctgggctgaagcaatcctccggcctcagcctcttgagtagctgggattacaggagggcaccaccacgcccagctacatttttaagttttttgtagatgtgggtctcactatgttgcccaggctgctctcaaactcctggcctcaagtgatgcacctgctgcggcctcccaaagtgctgggattacaggcgtgagcccctgcgccccatccatttcctctgttaatcagttcttaggattataacgattgctccctcatcaccatgccctgcatttccctgagtttccttcctgggcagtggagacgtaagcacagagcagtgtcacatggcatctgtttcatcatttcccatttgaagaacccttggggaccattaggcaggaccaaatgacagggtcttaggaaggaggatcctgactgctcagcccttggacttctgctcttgccatttctcctcatagccagtcaggtcgcgtcagcccgtcaacatggagaaccttcccataaacaatgggagcggccagtcctacgggcttgtcctgtatgagaagtccatctgctccggaggccgcctccgtgcccacgctcatgacgtggcacaggtgtttttggatgagacaatgatagggattctgaatgagaataataaggacctgcacattcctgaactcagggaataactggatctgtcagcatcaataactcttccctggagggctttaccatctattccctggagatgaaaatgagcttctttgagaggctccgctctgccacctggaagcctgtcccagacagccaccagggcccggccttctactgtgggaccttgaaggctggcccttctcccaaggacaccttcctgagcctgctgaactggaattatggatttgtgttcatcaatggacgtaaccttgggcgatattggaatattgggcctcagaaaacactgtaccttcctggagtttggcttcatccagaagacaatgaggtcatcttgtttgagaagatgatgagtggctcagatatcaaatctacagacaagcccacgctgtaaaactgtgtctgaacatttttttttttttttgagatggagtctcactttgtcgcccaggctggagtgcagtggcacaatctctgctcactgcaagctcagcctctcgggttcacgccattctcctgcctcagcctccccagcagctgggactacaggtgcacgccaccacgcctggctaattttttgtatttttagtagagatggggtttcaccaagttagccaggatggtcccaatctcctgaccttgtgatctgctctcctcagcctcccaaagtactgggattacaggcgtgagccaccactcccggccgtgaacatattttttgggttgctggagttcatctataagtcatttttgaggaataagatttatgttaagactatcaaacacagtgttgcctacaatagcaaaaatgtgaaaataacaacaacaacaaaacagcagaggaattgttatgtattttgtagtctatctatatgatgcctatttttaggctttaaaaagtcttcaaaatctttaatgactgatttatctagttaaatgcttaatccttagcaggctcttattctttaattaaacgtgcctttgagtagatgtgaataaaataaaaacaagtttc

SEQ ID NO: 7186 - DNA, 1711 bp, Homo sapiens
cttcaactgagaacccgaaaacagtggccaaatgtcaggtaactcccagaagaaatgttctccaaaaacgcccagtgatagtgaaggtactgagtacaacaaagccatttgaatatgagaccccagaaatggagaaaaaaataatgtttcatgctacagtggctacacagacacagttcttccatgtgaaggttttaaacaccagcttgaaggagaaattcaatggaaagaaaatcatcatcatatcagattatttggaatatgatagtctcctagaggtcaatgaagaatctactgtatctgaagctggtcctaaccaaacgtttgaggttccaaataaaatcatcaacagagcaaaggaaactctgaagattgatattcttcacaaacaagcttcaggaaatattgtatatggggtatttatgctacataagaaaacagtaaatcagaagaccacaatctacgaaattcaggatgatagaggaaaaatggatgtagtggggacaggacaatgtcacaatatcccctgtgaagaaggagataagctccaacttttctgctttcgacttagaaaaaagaaccagatgtcaaaactgatttcagaaatgcatagttttatccagataaagaaaaaaacaaacccgagaaacaatgaccccaagagcatgaagctaccccaggaacagcgtcagcttccatatccttcagaggccagcacaaccttccctgagagccatcttcggactcctcagatgccaccaacaactccatccagcagtttcttcaccaagttgaaaccaagactgaagactgaacctgaagaagtttccatagaagacagtgcccagagtgacctcaaagaagtgatggtgctgaacgcaacagaatcatttgtatatgagcccaaagagcagaagaaaatgtttcatgccacagtggcaactgagaatgaagtcttccgagtgaaggtttttaatattgacctaaaggagaagttcaccccaaagaagatcattgccatagcaaattatgtttgccgcaatgggttcctggaggtatatcctttcacacttgtggctgatgtgaatgctgaccgaaacatggagatcccaaaaggattgattagaagtgccagcgtaactcctaaaatcaatcagctttgctcacaaactaaaggaagttttgtgaatggggtgtttgaggtacataagaaaaatgtaaggggtgaattcacttattatgaaatacaagataatacagggaagatggaagtggtggtgcatggacgactgaccacaatcaactgtgaggaaggagataaactgaaactcacctgctttgaattggcaccgaaaagtgggaataccggggagttgagatctgtaattcatagtcacatcaaggtcatcaagaccaggaaaaacaagaaagacatactcaatcctgattcaagtatggaaacttcaccagactttttcttctaaaatctggatgtcattgacgataatgtttatggagataaggtctaagtgcctaaaaaaatgtacatatacctggttgaaatacaacactatacatacacaccaccatatatactagctgttaatcctatggaatggggtattgggagtgcttttttaatttttcatagtttttttttaataaaatggcatattttgcatctacaacttctataatttgaaaaaataaa

SEQ ID NO: 7187 - DNA, 4253 bp, Homo sapiens
agtcccggctggagcgactcggccgtggcggtggccgttaccgttgcctctgggaggctctggcggcggcggcggcccgcggggttcgcggagcgcagcgggccgcccttcgcccgtggccgcctcaagcagcctcgcgccgacacaggggaggcgagacggcggctgcggaggcggcggcgcattgtgcccggccccctccttggcggctcctgcccccgggcggctgtgggatctgggcagccccggggcggcggccgaggctacagagccggcggcaggggatggcaagatagcggcgcgggagcgtaccgactgactgcattgcacagatgatggatatttacgtatgtttgaaacgaccatcctggatggtggacaataaaagaatgaggactgcttcaaatttccagtggctgttatcaacatttattcttctatatctaatgaatcaagtaaatagccagaaaaagggggctcctcatgatttgaagtgtgtaactaacaatttgcaagtgtggaactgttcttggaaagcaccctctggaacaggccgtggtactgattatgaagtttgcattgaaaacaggtcccgttcttgttatcagttggagaaaaccagtattaaaattccagctctttcacatggtgattatgaaataacaataaattctctacatgattttggaagttctacaagtaaattcacactaaatgaacaaaacgtttccttaattccagatactccagagatcttgaatttgtctgctgatttctcaacctctacattatacctaaagtggaacgacaggggttcagtttttccacaccgctcaaatgttatctgggaaattaaagttctacgtaaagagagtatggagctcgtaaaattagtgacccacaacacaactctgaatggcaaagatacacttcatcactggagttgggcctcagatatgcccttggaatgtgccattcattttgtggaaattagatgctacattgacaatcttcatttttctggtctcgaagagtggagtgactggagccctgtgaagaacatttcttggatacctgattctcagactaaggtttttcctcaagataaagtgatacttgtaggctcagacataacattttgttgtgtgagtcaagaaaaagtgttatcagcactgattggccatacaaactgccccttgatccatcttgatggggaaaatgttgcaatcaagattcgtaatatttctgtttctgcaagtagtggaacaaatgtagtttttacaaccgaagataacatatttggaaccgttatttttgctggatatccaccagatactcctcaacaactgaattgtgagacacatgatttaaaagaaattatatgtagttggaatccaggaagggtgacagcgttggtgggcccacgtgctacaagctacactttagttgaaagtttttcaggaaaatatgttagacttaaaagagctgaagcacctacaaacgaaagctatcaattattatttcaaatgcttccaaatcaagaaatatataattttactttgaatgctcacaatccgctgggtcgatcacaatcaacaattttagttaatataactgaaaaagtttatccccatactcctacttcattcaaagtgaaggatattaattcaacagctgttaaactttcttggcatttaccaggcaactttgcaaagattaattttttatgtgaaattgaaattaagaaatctaattcagtacaagagcagcggaatgtcacaatcaaaggagtagaaaattcaagttatcttgttgctctggacaagttaaatccatacactctatatacttttcggattcgttgttctactgaaactttctggaaatggagcaaatggagcaataaaaaacaacatttaacaacagaagccagtccttcaaaggggcctgatacttggagagagtggagttctgatggaaaaaatttaataatctattggaagcctttacccattaatgaagctaatggaaaaatactttcctacaatgtatcgtgttcatcagatgaggaaacacagtccctttctgaaatccctgatcctcagcacaaagcagagatacgacttgataagaatgactacatcatcagcgtagtggctaaaaattctgtgggctcatcaccaccttccaaaatagcgagtatggaaattccaaatgatgatctcaaaatagaacaagttgttgggatgggaaaggggattctcctcacctggcattacgaccccaacatgacttgcgactacgtcattaagtggtgtaactcgtctcggtcggaaccatgccttatggactggagaaaagttccctcaaacagcactgaaactgtaatagaatctgatgagtttcgaccaggtataagatataattttttcctgtatggatgcagaaatcaaggatatcaattattacgctccatgattggatatatagaagaattggctcccattgttgcaccaaattttactgttgaggatacttctgcagattcgatattagtaaaatgggaagacattcctgtggaagaacttagaggctttttaagaggatatttgttttactttggaaaaggagaaagagacacatctaagatgagggttttagaatcaggtcgttctgacataaaagttaagaatattactgacatatcccagaagacactgagaattgctgatcttcaaggtaaaacaagttaccacctggtcttgcgagcctatacagatggtggagtgggcccggagaagagtatgtatgtggtgacaaaggaaaattctgtgggattaattattgccattctcatcccagtggcagtggctgtcattgttggagtggtgacaagtatcctttgctatcggaaacgagaatggattaaagaaaccttctaccctgatattccaaatccagaaaactgtaaagcattacagtttcaaaagagtgtctgtgagggaagcagtgctcttaaaacattggaaatgaatccttgtaccccaaataatgttgaggttctggaaactcgatcagcatttcctaaaatagaagatacagaaataatttccccagtagctgagcgtcctgaagatcgctctgatgcagagcctgaaaaccatgtggttgtgtcctattgtccacccatcattgaggaagaaataccaaacccagccgcagatgaagctggagggactgcacaggttatttacattgatgttcagtcgatgtatcagcctcaagcaaaaccagaagaagaacaagaaaatgaccctgtaggaggggcaggctataagccacagatgcacctccccattaattctactgtggaagatatagctgcagaagaggacttagataaaactgcgggttacagacctcaggccaatgtaaatacatggaatttagtgtctccagactctcctagatccatagacagcaacagtgagattgtctcatttggaagtccatgctccattaattcccgacaatttttgattcctcctaaagatgaagactctcctaaatctaatggaggagggtggtcctttacaaacttttttcagaacaaaccaaacgattaacagtgtcaccgtgtcacttcagtcagccatctcaataagctcttactgctagtgttgctacatcagcactgggcattcttggagggatcctgtgaagtattgttaggaggtgaacttcactacatgttaagttacactgaaagtgttcatgtgcttttaatgtagtctaaaagccaaagtatagtgactcagaatcctcaatccacaaaactcaagattgggagctctttgtgatcaagccaaagaattctcatgtactctaccttcaagaagcatttcaaggctaatacctacttgtacgtacatgtaaaacaaatcccgccgcaactgttttctgttctgttgtttgtggttttctcatgtgtatacttggtggaattgtaagtggatttgcaggccagggagaaaatgtccaagtaacaggtgaagtttatttgcctgacgtttactcctttctagatgaaaaccaagcacagattttaaaacttctaagattattctcctctatccacagcattcacaaaaattaatataatttttaatgtagtgacagcgatttagtgttttgtttgataaagtatgcttatttctgtgcctactgtataatggttatcaaacagttgtctc

SEQ ID NO: 7188 - DNA, 3597 bp, Homo sapiens
accctcttttcttatcattgacatttaaactctggggcaggtcctcgcgtagaacgcggctgtcagatctgccacttcccctgccgagcggcggtgagaagtgtgggaaccggcgctgccaggctcacctgcctccccgccctccgctcccagggggaagactttaactaggggcgcgcagatgtgtgaggccttttattgtgagagtggacagacatccgagatttcagagccccatattcgagccccgtggaatcccgcggcccccagccagagccagcatgcagaacagtcacagcggagtgaatcagctcggtggtgtctttgtcaacgggcggccactgccggactccacccggcagaagattgtagagctagctcacagcggggcccggccgtgcgacatttcccgaattctgcaggtgtccaacggatgtgtgagtaaaattctgggcaggtattacgagactggctccatcagacccagggcaatcggtggtagtaaaccgagagtagcgactccagaagttgtaagcaaaatagcccagtataagcgggagtgcccgtccatctttgcttgggaaatccgagacagattactgtccgagggggtctgtaccaacgataacataccaagcgtgtcatcaataaacagagttcttcgcaacctggctagcgaaaagcaacagatgggcgcagacggcatgtatgataaactaaggatgttgaacgggcagaccggaagctggggcacccgccctggttggtatccggggacttcggtgccagggcaacctacgcaagatggctgccagcaacaggaaggagggggagagaataccaactccatcagttccaacggagaagattcagatgaggctcaaatgcgacttcagctgaagcggaagctgcaaagaaatagaacatcctttacccaagagcaaattgaggccctggagaaagagtttgagagaacccattatccagatgtgtttgcccgagaaagactagcagccaaaatagatctacctgaagcaagaatacaggtatggttttctaatcgaagggccaaatggagaagagaagaaaaactgaggaatcagagaagacaggccagcaacacacctagtcatattcctatcagcagtagtttcagcaccagtgtctaccaaccaattccacaacccaccacaccggtttcctccttcacatctggctccatgttgggccgaacagacacagccctcacaaacacctacagcgctctgccgcctatgcccagcttcaccatggcaaataacctgcctatgcaacccccagtccccagccagacctcctcatactcctgcatgctgcccaccagcccttcggtgaatgggcggagttatgatacctacacccccccacatatgcagacacacatgaacagtcagccaatgggcacctcgggcaccacttcaacaggactcatttcccctggtgtgtcagttccagttcaagttcccggaagtgaacctgatatgtctcaatactggccaagattacagtaaaaaaaaaaaaaaaaaaaaaaaggaaaggaaatattgtgttaattcagtcagtgactatggggacacaacagttgagctttcaggaaagaaagaaaaatggctgttagagccgcttcagttctacaattgtgtcctgtattgtaccactggggaaggaatggacttgaaacaaggacctttgtatacagaaggcacgatatcagttggaacaaatcttcattttggtatccaaacttttattcattttggtgtattatttgtaaatgggcatttgtatgttataatgaaaaaaagaacaatgtagactggatggatgtttgatctgtgttggtcatgaagttgttttttttttttttaaaaagaaaaccatgatcaacaagctttgccacgaatttaagagttttatcaagatatatcgaatacttctacccatctgttcatagtttatggactgatgttccaagtttgtatcattcctttgcatataattaaacctggaacaacatgcactagatttatgtcagaaatatctgttggttttccaaaggttgttaacagatgaagtttatgtgcaaaaaagggtaagatataaattcaaggaagaaaaaaagttgatagctaaaaggtagagtgtgtcttcgatataatccaatttgttttatgtcaaaatgtaagtatttgtcttccctagaaatcctcagaatgatttctataataaagttaatttcatttatatttgacaagaatatagatgttttatacacattttcatgcaatcatacgtttcttttttggccagcaaaagttaattgttcttagatatagttgtattactgttcacggtccaatcattttgtgcatctagagttcattcctaatcaattaaaagtgcttgcaagagttttaaacttaagtgttttgaagttgttcacaactacatatcaaaattaaccattgttgattgtaaaaaaccatgccaaagcctttgtatttcctttattatacagttttctttttaaccttatagtgtggtgttacaaattttatttccatgttagatcaacattctaaaccaatggttactttcacacacactctgttttacatcctgatgatccttaaaaaataatccttatagataccataaatcaaaaacgtgttagaaaaaaattccacttacagcagggtgtagatctgtgcccatttatacccacaacatatatacaaaatggtaacatttcccagttagccatttaattctaaagctcaaagtctagaaataatttaaaaatgcaacaagcgattagctaggaattgttttttgaattaggactggcattttcaatctgggcagatttccattgtcagcctatttcaacaatgatttcactgaagtatattcaaaagtagatttcttaaaggagactttctgaaagctgttgcctttttcaaataggccctctcccttttctgtctccctcccctttgcacaagaggcatcatttcccattgaaccactacagctgttcccatttgaatcttgctttctgtgcggttgtggatggttggagggtggaggggggatgttgcatgtcaaggaataatgagcacagacacatcaacagacaacaacaaagcagactgtgactggccggtgggaattaaaggccttcagtcattggcagcttaagccaaacattcccaaatctatgaagcagggcccattgttggtcagttgttatttgcaatgaagcacagttctgatcatgtttaaagtggaggcacgcagggcaggagtgcttgagcccaagcaaaggatggaaaaaaataagcctttgttgggtaaaaaaggactgtctgagactttcatttgttctgtgcaacatataagtcaatacagataagtcttcctctgcaaacttcactaaaaagcctgggggttctggcagtctagattaaaatgcttgcacatgcagaaacctctggggacaaagacacacttccactgaattatactctgctttaaaaaaatccccaaaagcaaatg

SEQ ID NO: 7189 - DNA, 595 bp, Homo sapiens
actttgtttaaaatttccctttgctactgggaggaaatggaaagcagtaagataacttcatttgtaagagcaatgctaagaagacgtttggtttaaagaattaaaaggaagaacaacttaagagcttcttcaaagtttcccgcatgaaaattacttaaacgttgcacacaacgtttcacaaaatcttttgtgaaagaagaaaaggaaattcagtgtgtgagtctcagcaggagttaagctaatgcagcttaaaataatgccgaaaaagaagcgcttatctgcgggcagagtgcccctgattctcttcctgtgccagatgattagtgcactggaagtacctcttgatccaaaacttcttgaagacttggtacagcctccaaccatcacccaacagtctccaaaagattacattattgaccctcgggagaatattgtaatccagtgtgaagccaaagggaaaccgcccccaagcttttcctggacccgtaatgggactcattttgacatcgataaagaccctctggtcaccatgaagcctggcacaggaacgctcataattaacatcatgagcgaagggaaagctgagacctatgaa

SEQ ID NO: 7190 - DNA, 3363 bp, Homo sapiens
gtcatgcatacattagagcctctgatgagtttgtctttggggactctggggctgtactacccagtgtcatcacaaattaccaggagaaattgcttccagctcacaatcacatctgcttttggcaagaactaatgcaccaagacttcaagttctaagcctctgttcagattttaattgcaattgatcaggtttatattattgtacctccagagacctcctagagccagaacccggctggcttgctgtttcctttagagcagcgcatatcattatttggtgttctggtggaggacttttctgatggcagaaattagtttctctgggttcatcaggacgggatgcttcaagatttaagtgcaagtgtcttctttccaccttgttcacaacacagaacgttagctcaggtacctgacaatgatgagcagtttgtaccagactatcaggctgaaagtttggcttttcatggcctgccactgaaaatcaagaaagaaccccacagtccatgttcagaaatcagctctgcctgcagtcaagaacagccctttaaattcagctatggagaaaagtgcctgtacaatgtcagtgcctatgatcagaagccacaagtgggaatgaggccctccaacccccccacaccatccagcacgccagtgtccccactgcatcatgcatctccaaactcaactcatacaccgaaacctgaccgggccttcccagctcacctccctccatcgcagtccataccagatagcagctaccccatggaccacagatttcgccgccagctttctgaaccctgtaactcctttcctcctttgccgacgatgccaagggaaggacgtcctatgtaccaacgccagatgtctgagccaaacatccccttcccaccacaaggctttaagcaggagtaccacgacccagtgtatgaacacaacaccatggttggcagtgcggccagccaaagctttccccctcctctgatgattaaacaggaacccagagattttgcatatgactcagaagtgcctagctgccactccatttatatgaggcaagaaggcttcctggctcatcccagcagaacagaaggctgtatgtttgaaaagggccccaggcagttttatgatgacacctgtgttgtcccagaaaaattcgatggagacatcaaacaagagccaggaatgtatcgggaaggacccacataccaacggcgaggatcacttcagctctggcagtttttggtagctcttctggatgacccttcaaattctcattttattgcctggactggtcgaggcatggaatttaaactgattgagcctgaagaggtggcccgacgttggggcattcagaaaaacaggccagctatgaactatgataaacttagccgttcactccgctattactatgagaaaggaattatgcaaaaggtggctggagagagatatgtctacaagtttgtgtgtgatccagaagcccttttctccatggcctttccagataatcagcgtccactgctgaagacagacatggaacgtcacatcaacgaggaggacacagtgcctctttctcactttgatgagagcatggcctacatgccggaagggggctgctgcaacccccacccctacaacgaaggctacgtgtattaacacaagtgacagtcaagcagggcgtttttgcgcttttccttttttctgcaagatacagagaattgctgaatctttgttttatttctgttgtttgtattttatttttaaataataatacacaaaaaggggcttttcctgttgcattattctatggtctgccatggactgtgcactttatttgagggtgggtgggagtaatctaaacatttattctgtgtaacaggaagctaatgggtgaatgggcagagggatttggggattactttttacttaggcttgggatggggtcctacaagttttgagtatgatgaaactatatcatgtctgtttgatttcataacaacataagataatgtttattttatcggggtatctatggtacagttaatttcacgttgtgtaaatatccacttggagactatttgccttgggcattttcccctgtcatttatgagtctctgcaggtgtacaaaaaaaccccaatctactgtaaatggcagtttaattgttagaaatgactgtttttgcaccacttgtaaaaaggtatttagcgattgcatttgctgtttgttgttttattttgctttatatatgacttgcagaggataaccataaaatgggtaattctctctgaagttgaataatcaccatgactgtaaatgaggggcacaattttggactctggcgccaaactgagtcataggccagtagcattacgtgtatctggtgccaccttgctgtttagatacaaatcataccgtcttttaaatattttgaagcccatttcagttaaataatgacatgtcatggtcctttggaatcttcatttaaatgttaaatctggaatcaaaatgaagcaaaaaatatctgtctccttttcactttcttcagtacataaatacattatttaatcaataagaattaactgtactaaatcatgtattatgctgttctagttacagcaaacactctttaagaaaaatatccaatacactaaataggtactatagtaatttttagacatggtacccattgatatgcatttaaaccttttactgctgtgttatgttgataacatatataaatattagataatgctaatgcttctgctgctgtcttttctgtaatattctctttcatgctgaatttactatgaccatttataagcagtgcagttaactacagatagcatttcaggacaaaatagatgactcaaaccatttattgcttaaaaaatagcttacgccatgctatgctataagcagcttttatgcacattgacaaatgaagagtaagcttcagcttgctaaaggaaactgtggaaccttttgtaacttttggtgatatggaaaattatttacaaaccgtcaaagaatatgaggaagttgctgtatgacatagtgctggcactgatattatccatcatctctttttggacacttctgtaaatgtgattggattgtttgaaagaagatttaaagtttcaaagttttttgttctgtttttgctttgcatttggagaaaatattgaaagcagggtatgttgtttcattcaccttgaaaaaaccatgagtaaatggggatatagaatctctgaatagctcgctaaaagattcaagcaagggacatgaattttgttccatctatcaataatatccagaagaacaacttttttaaagagtctatagcaaaaagcaaaaaaaaaaaaaaa

SEQ ID NO: 7191 - DNA, 651 bp, Homo sapiens
ggccaggtcccaggaacccatatttagaactgagggtcctatggcccagaaccaggcatctgtacttaagaaccaagcacctgtgaccaggacccaggcacccatcactggaaccctctgtcaggatgccagatccaactctcatccagtgaagccctcaagactcaatgtcttctgttgcccccattgttctttgacttttagcaagaaatcctatctctccagacaccagaaggcccacctcacagagccgcccaactactgcttccattgcagcaagtctttcagctcattttccaggctggtcagacaccagcagacccactggaagcagaagagctacctttgccctatctgtgacctctcctttggggagaaagagggccttatggatcactggaggggctataaaggcaaggacctgtgccagagcagccaccataaatgccgggtgatcctgggccagtggcttggcttctctcatgatgtccccactatggctggggaggaatggaagcatggaggtgatcaatctccccccaggatccatacccccaggagaagaggcctaagagagaaggcctgcaaaggagacaaaacaaaggaggcagtgagcatcttgaaacataaataaatggcctttctgactga

SEQ ID NO: 7192 - DNA, 826 bp, Homo sapiens
gacactcttgaaccatatctcaaatctgaagtctcctggcttcagtaaggcccttttatggggtccagacagtcctgaaccagcctgaagatgctagtggacatccccatttattactgctctgtgttaaagcatggaccaaggagtcttggaaaaaaaatcacaaggtggctttctagaagatgaccatagaggaccttccagattttccattagaaggaaatcctttgtttggaagatacccatttatattttctgcttctgataccccagttatcttttccatttctgcagcaccaatgccttcagactgtgaattttctttctttgatcctaatgatgcatcatgccaggaaattctttttgatcccaaaacttcagtttcagaattatttgccattttgagacagtgggttcctcaggtccaacaaaacattgacattattggaaatgagattcttaagagaggttgcaatgtgaatgatagagatggattgacagatatgactcttttacattatacctgcaaatctggagctcatggtattggtgatgtggaaacagctgtaaaatttgcaactcagcttattgacctgggagcagacattagtttgcggagtcgctggacaaacatgaatgctttgcattatgctgcttattttgatgtccctgaacttataagagtgattttgaaaacatcgaaaccaaaagatgtggatgccacttgcagtgattttaattttggaacagctttgcatattgcagcatacaacttgtgtgcaggtgctgtgaagtgcctcttggagcagggagcaaatcctgcatt

SEQ ID NO: 7193 - DNA, 571 bp, Homo sapiens
gagcgctctagacaggacatggctctgaagactcactctttggaatgtcctcttgctcccggcttataaacaactgtcccgaggaaagaaaggttttacatagccaaatacagcctgacaaatggcacttcggaactgtgctttctgatgacaacgcgttcgatttctgacaaagcctctcgcacgctgcccctggagggaagtcctaagtaaaactcagaccctccttaaagtgaggagcgagggcttggacggtgaacacggcagcatggcatccgcggggcacattatcaccttgctcctgtggggttacttactggagctttggacaggaggtcatacagctgatactacccacccccggttacgcctgtcacataaagaatgaagagtgtttcttgtcagaggtgggatctcatctgggccttcacaacttgaatgaagaaaagacatggaggaggaaactgcaggctcaagtaaaaagagctcttgaatctgaacagaacatcaatatttcatagcccttttggatttcttgatctccatacaatgctgctggatgaatatcaag

SEQ ID NO: 7194 - DNA, 5608 bp, Homo sapiens; identical to SEQ ID NO: 2341

SEQ ID NO: 7195 - DNA, 4544 bp, Homo sapiens
gtgaactgttgcaccgtgcaattgcacactataaatgtctttccttatctgtgtgtactcttatctcactgttctattttttctcctcatttatattaactctttcttacctttttttctgaacttctaggccttctctttccagaactggtggaagacaaatgaaacggccaagatggtaagaaacaagccgcatttctccttggggagactgataatttaaaaggtttgttgtgtcagaaacattcccagcttcatcaccaaccctttccttccacctctgcccactggagaccacttatatcccgaagcggacgcggcagctgaagtcaggaaaccatgcatcacattagcaggagccaactgcagactttaaactccgttcaacatgtggatgcggcagagaaatgacctgtccagacaagccggggcagctcataaactggttcatctgctccctgtgcgtcccgcgggtgcgtaagctctggagcagccggcgtccaaggacccggagaaaccttctgctgggcactgcgtgtgccatctacttgggcttcctggtgagccaggtggggagggcctctctccagcatggacaggcggctgagaaggggccacatcgcagccgcgacaccgccgagccatccttccctgagatacccctggatggtaccctggcccctccagagtcccagggcaatgggtccactctgcagcccaatgtggtgtacattaccctacgctccaagcgcagcaagccggccaatatccgtggcaccgtgaagcccaagcgcaggaaaaagcatgcagtggcatcggctgccccagggcaggaggctttggtcggaccatcccttcagccgcaggaagcggcaagggaagctgatgctgtagcacctgggtacgctcagggagcaaacctggttaagattggagagcgaccctggaggttggtgcggggtccgggagtgcgagccgggggcccagacttcctgcagcccagctccagggagagcaacattaggatctacagcgagagcgccccctcctggctgagcaaagatgacatccgaagaatgcgactcttggcggacagcgcagtggcagggctccggcctgtgtcctctaggagcggagcccgtttgctggtgctggaggggggcgcacctggcgctgtgctccgctgtggccctagcccctgtgggcttctcaagcagcccttggacatgagtgaggtgtttgccttccacctagacaggatcctggggctcaacaggaccctgccgtctgtgagcaggaaagcagagttcatccaagcagcagcagcagcgtgtctttccatgcgcttggcattctttattttcccagcctgggaggatatgagagttccagggaaatgctgtattggacatgcaagactcacctggggaacttatcagcagttgctgaaacagaaatgctggcagaatggccgagtacccaagcctgaatcgggttgtactgaaatacatcatcatgagtggtccaagatggcactctttgattttttgttacagatttataatcgcttagatacaaattgctgtggattcagacctcgcaaggaagatgcctgtgtacagaatggattgaggccaaaatgtgatgaccaaggttctgcggctctagcacacattatccagcgaaagcatgacccaaggcatttggtttttatagacaacaagggtttctttgacaggagtgaagataacttaaacttcaaattgttagaaggcatcaaagagtttccagcttctgcagtttctgttttgaagagccagcacttacggcagaaacttcttcagtctctgtttcttgataaagtgtattgggaaagtcaaggaggtagacaaggaattgaaaagcttatcgatgtaatagaacacagagccaaaattcttatcacctatatcaatgcacacggggtcaaagtattacctatgaatgaatgacaaaagaatcttctggctagggtgttagatatatttatgcatttttggttttgtttttaaatcaagcacatcaacctcaagcccgtttagcaatgaggcagtgtagatgaatacgtaaaataaatgactttaaccaagtagctataatgggacttagcactgtatgcatacttaaaaaggttttgaaaaacaaactacttgagaaatatttgtttatatttttctctaacatcatgctatgtgtcagtctgaacatctgacaacagaaatttcagttattattctagctaagttttgaaaacatttgtcatgctgtttaatagaaaactgcaaaccagagacactgactccattaataaaccatattttgtgccgttttgactgttctgaccaaatactaatgggaacaattcttgacgtttttctgttgctgattgttaacatagagcagtctctacactaccctgaggcaactctacattggaacactgaggcttacagcctgcaagagcatcagagctgaccatacatttaaacagaaatgctggtttatttgcaaaatcaccagtatattttctattgtgtctataaaaaatcagtcatttaagtacaagaatcatattttccattcctttttagaaatttattttgttgtccctatggaaatcattcacatctgacaatttatatgttaaagagttttactctctctattttggtccaatttgtatctagtggctgagaaattaaataattctaaagtatgaagttacctatctgaaaatgtacttacagagtatcattttaaaatggatgtctctttaaaaattttgttacttttaccaacaatgtaatataatttatgtatattttattaataatagtgaattccttaaaatttgttctatgtacttatatttaatttgatttaatggttactgcccagatattgagaattggttcaaatattgagtgtgtttcaatatattatctggcttatttcaacatgagtaatatgagcaaaataagttaaaacctgcgtctgatcaattttcctcatgactagaactaaaacagtaaatttggacaatattaagcctcaaataatcatctccaaactccttctaacactttttaaatcagattggaagacatggacaaatcaggttcatgtgttgcatctttatgtcctttgccaatatccaagatcatcacatatggtagatattcacatggagtttcaaattcagaatagattaccattaccttcctgcccttacacatcctactccttatttaaaagttctatttgtgacttttcatttcctgaaagtttaaaaatacaatttgagaatgtttataatacattctctcctgtcttttcacggttacgtctgttattgctgaaatacaccacattttctttgttctggtcaaggttaactcaatatctgtgtgaaagagaactactaacaacgttacaatagaggctagatttgaaaaaaaaaatctatagatctaattgatacaattgtagaacaaaatgtcaaaataatgttttaagtataagagaagatggaccaaggagagagagatcatttgaaaatctaattgtagcttttctaggctcacattcatgtactacttttagcacccttatgggctgtgctcgccccctggacagttgagctttggattatcttcctcttcaattttccctctattgacccgagtgtctccctctgcttctacagatttatagtactccttggctcttttgagtctccacttttactcactgtctctgggatttttaagatccttttcttctcttataaatcatcctcttaatgaaaattagcctaacaaaagtttggagactggaatcctactttgagccactgacttgaaataactcttttggcaagttgcctgacatcctgtcttaccaaggtggcatatttgcatttttactgcttaaaacatttttttttttttaccatctttatccaaatttatcatattgatggtaggactaacaggctttttagaagctggctttaactttgagtctcaagctacaatgctgttgggcagcctggtcttcccacgtgagggtttaactttgtttatttgcctccagttattccaaaatgcttattaaatgaaagtcccaggaacatgtttattttagtcacctttgctttttaacaattttgttttgtaatcaatgagtaattcatgatgaattatttttgactaatggatagccgaaggccaggcttttaattctaataggtaatgttcttcttttgtcttattgaaacaatgagaatactctgtgcatttcaaatgcactccgattatgctgtggttttattcacataagcacaatatgtgttttatttataacttcataacaaacttataatataataatttaccttagcagacatgcaaaagcttattcttgtgtgacttactttctttaagctaataatataaaaataaatatgtatcttaaaaatctataataaaacattagaaattaaa

SEQ ID NO: 7196 - DNA, 587 bp, Homo sapiens
acttcatggcttctcacgcttgtgctgcatatcccacaccaattagacccaaggatcagttggaagtttccaggacatcttcattttatttccaccctcaatccacatttccagatgtctctgcagcaaagcgaaattccaggagaagaggacaaagatactcagagagaaaaagtaaaagaccgaagaaggaggctggagagaccaggatccttccagctgaacaaagtcagccacaaagcagactagccagccggctacaattggagtcagagtcccaaagacatgggcttgttagagtgctgtgcaagatgtctggtaggggccccctttgcttccctggtggccactggattgtgtttctttggggtggcactgttctgtggctgtggacatgaagccctcactggcacagaaaagctaattgagacctatttctccaaaaactaccaagactatgagtatctcatcaatgtgatccatgccttccagtatgtcatctatggaactgcctctttcttcttcctttatggggccctcctgctggctgagggcttctacaccaccggcgcagtcaggcagatctt

SEQ ID NO: 7197 - DNA, 2621 bp, Homo sapiens
gagctcatcgaagtcatgctctgcacacatattatttatagcagatctgaggcatgcatggtgtttgacatttctgtcttttaagtagggggacttcaaaaagtcgtgggcatccccctaggcaaagtgcagtgggcagggaccaggcagggtgcgggcgcaaggcgaacgcgcagaccacgagtgtcctggcgcaggtgccgggggcggcggctgcaactccgcagcgtccgctcgggaggagagttcgcggctgatctccggatgccttgcagatgcaaaatgtgtctctggccagcaggaggaaggaagaggaagtgagagcagcggcagccggcggtgcagcagccggccgacccagagtgtatagacacgtgtggccgtttacgctgtaggatcctcattcccactggctttgaacattttggggacttacaatgccgccacccgcggacatcgtcaaggtggccatagaatggccgggcgcctaccccaaactcatggaaattgatcagaaaaaaccactgtctgcaataataaaggaagtctgtgatgggtggtctcttgccaaccatgaatattttgcactccagcatgccgatagttcaaacttctatatcacagaaaagaaccgcaatgagataaaaaatggcactatccttcgattaaccacatctccagctcagaacgcccagcagctccatgaacgaatccagtcctcgagtatggatgccaagctggaagccctgaaggacttggccagcctctcccgggatgtcacgtttgcccaggagtttataaacctggacggtatctctctcctcacgcagatggtggagagcggcactgagcgataccagaaattgcagaagatcatgaagccttgctttggagacatgctgtccttcaccctgacggccttcgttgagctgatggaccatggcatagtgtcctgggatacattttcggtggcgttcattaagaagatagcaagttttgtgaacaagtcagccatagacatctcgatcctgcagcggtccttggccattttggagtcgatggtgctcaatagccatgacctctaccagaaagtggcgcaggagatcaccatcggccagctcattccacacctgcaagggtcagatcaagaaatccaaacctatactattgcagtgattaatgcgcttttcctgaaggctcctgatgagaggaggcaggagatggcgaatattttggctcagaagcaactgcgttccatcattttaacacatgtcatccgagcccagcgggccatcaacaatgagatggcgcaccagctgtatgttctacaagtgctcacctttaacctcctggaagacaggatgatgaccaaaatggacccccaggaccaggctcagagggacatcatatttgaacttcgaagaattgcttttgatgctgagtctgaacctaacaacagcagtggcagcatggagaaacgcaagtccatgtacacgcgagattataagaagcttgggttcattaatcatgtcaaccctgccatggacttcacgcagactccacctgggatgttggctctggacaacatgctgtactttgccaagcaccaccaagatgcctacatccggattgtgcttgagaacagtagtcgagaagacaagcatgaatgtccctttggccgcagtagtatagagctgaccaagatgctatgtgagatcttgaaagtgggcgagttgcctagtgagacctgcaacgacttccacccgatgttcttcacccacgacagatcctttgaggagtttttctgcatctgtatccagctcctgaacaagacatggaaggaaatgagggcaacttctgaagacttcaacaaggtaatgcaggtggtgaaggagcaggttatgagagcacttacaaccaagcctagctccctggaccagttcaagagcaaactgcagaacctgagctacactgagatcctgaaaatccgccagtccgagaggatgaaccaggaagatttccagtcccgcccgattttggaactaaaggagaagattcagccagaaatcttagagctgatcaaacagcaacgcctgaaccgccttgtggaagggacctgctttaggaaactcaatgcccggcggaggcaagacaagttttggtattgtcggctttcgccaaatcacaaagtcctgcattacggagacttagaagagagtcctcagggagaagtgccccacgattccttgcaggacaaactgccggtggcagatatcaaagccgtggtgacgggaaaggactgccctcatatgaaagagaaaggtgcccttaaacaaaacaaggaggtgcttgaactcgctttctccatcttgtatgactcaaactgccaactgaacttcatcgctcctgacaagcatgagtactgtatctggacggatggactgaatgcgctactcgggaaggacatgatgagcgacctgacgcggaatgacctggacaccctgctcagcatggaaatcaagctccgcctcctggacctggaaaacatccagatccctgacgcacctccgccgattcccaaggagcccagcaactatgacttcgtctatgactgtaactga

SEQ ID NO: 7198 - DNA, 928 bp, Homo sapiens
acatcaccacggcggcagccctttaaacccctcacccagccagcgccccatcctgtctgtccgaacccagacacaagtcttcactccttcctgcgagccctgaggaagccttctttccccagacatggccaacaagggtccttcctatggcatgagccgcgaagtgcagtccaaaatcgagaagaagtatgacgaggagctggaggagcggctggtggagtggatcatagtgcagtgtggccctgatgtgggccgcccagaccgtgggcgcttgggcttccaggtctggctgaagaatggcgtgattctgagcaagctggtgaacagcctgtaccctgatggctccaagccggtgaaggtgcccgagaacccaccctccatggtcttcaagcagatggagcaggtggctcagttcctgaaggcggctgaggactatggggtcatcaagactgacatgttccagactgttgacctctttgaaggcaaagacatggcagcagtgcagaggaccctgatggctttgggcagcttggcagtgaccaagaatgatgggcactaccgtggagatcccaactggtttatgaagaaagcgcaggagcataagagggaattcacagagagccagctgcaggagggaaagcatgtcattggccttcagatgggcagcaacagaggggcctcccaggccggcatgacaggctacggacgacctcggcagatcatcagttagagcggagagggctagccctgagcccggccctcccccagctccttggctgcagccatcccgcttagcctgcctcacccacacccgtgtggtaccttcagccctggccaagctttgaggctctgtcactgagcaatggtaactgcacctgggcagctcctccctgtgcccccagcctcagcccaacttcttacccgaaag

SEQ ID NO: 7199 - DNA, 2133 bp, Homo sapiens
ggaataataagacacgccctgaaggagtacatcgtctagtgagggacagaccaagcacgcaaaacaaattgcaatataatgtgataagttctttaaaagaggtaagagcaacgtgctttgggagcagagaagagggagaaagcagcatcttgcctggatgagccaggggacacagaagagaagcccactatctcatttaatctttacaactctcttgcaaggttccctggttgtgaaaatacatgagataaatcatgaaggccactatcatcctccttctgcttgcacaagtttcctgggctggaccgtttcaacagagaggcttatttgactttatgctagaagatgaggcttctgggataggcccagaagttcctgatgaccgcgacttcgagccctccctaggcccagtgtgccccttccgctgtcaatgccatcttcgagtggtccagtgttctgatttgggtctggacaaagtgccaaaggatcttccccctgacacaactctgctagacctgcaaaacaacaaaataaccgaaatcaaagatggagactttaagaacctgaagaaccttcacgcattgattcttgtcaacaataaaattagcaaagttagtcctggagcatttacacctttggtgaagttggaacgactttatctgtccaagaatcagctgaaggaattgccagaaaaaatgcccaaaactcttcaggagctgcgtgcccatgagaatgagatcaccaaagtgcgaaaagttactttcaatggactgaaccagatgattgtcatagaactgggcaccaatccgctgaagagctcaggaattgaaaatggggctttccagggaatgaagaagctctcctacatccgcattgctgataccaatatcaccagcattcctcaaggtcttcctccttcccttacggaattacatcttgatggcaacaaaatcagcagagttgatgcagctagcctgaaaggactgaataatttggctaagttgggattgagtttcaacagcatctctgctgttgacaatggctctctggccaacacgcctcatctgagggagcttcacttggacaacaacaagcttaccagagtacctggtgggctggcagagcataagtacatccaggttgtctaccttcataacaacaatatctctgtagttggatcaagtgacttctgcccacctggacacaacaccaaaaaggcttcttattcgggtgtgagtcttttcagcaacccggtccagtactgggagatacagccatccaccttcagatgtgtctacgtgcgctctgccattcaactcggaaactataagtaattctcaagaaagccctcatttttataacctggcaaaatcttgttaatgtcattgctaaaaaataaataaaagctagatactggaaacctaactgcaatgtggatgttttacccacatgacttattatgcataaagccaaatttccagtttaagtaattgcctacaataaaaagaaattttgcctgccattttcagaatcatcttttgaagctttctgttgatgttaactgagctactagagatattcttatttcactaaatgtaaaatttggagtaaatatatatgtcaatatttagtaaagcttttcttttttaatttccaggaaaaaataaaaagagtatgagtcttctgtaattcattgagcagttagctcatttgagataaagtcaaatgccaaacactagctctgtattaatccccatcattactggtaaagcctcatttgaatgtgtgaattcaatacaggctatgtaaaatttttactaatgtcattattttgaaaaaataaatttaaaaatacattcaaaattactattgtatacaagcttaattgttaatattccctaaacacaattttatgaagggagaagacattggtttgttgacaataacagtacatcttttcaagttctcagctatttcttctacctctccctatcttacatttgagtatggtaacttatgtcatctatgttgaatgtaagcttataaagcacaaagcatacatttcctgactggtctagagaactgatgtttcaatttacccctctgctaaataaatattaaaactatcatgtg

SEQ ID NO: 7200 - DNA, 5479 bp, Homo sapiens
gcgcagcccgcagaggcgctgcggcccgtgcagccccggaggcccctcgcggagaaggcggcggcggaggagaggccgagttaccgcccgccgcccgcgcccccccaaccccgccgccgccgccgccgccgccactgccccccctccccgcggcgccgcatcttgaatggaaacatggcggtgccggctcggacctgcggcgcctctcggcccggcccagcgcggactgcgcgcccctggcccggctgcggcccccaccctggccccggcacccggcgcccgacgtccgggcccccgcgcccgctgtggctgctgctgccgcttctaccgctgctcgccgcccccggcgcctctgcctacagcttcccccagcagcacacgatgcagcactgggcccggcgtctggagcaggaggtcgacggcgtgatgcggatttttggaggcgtccagcagctccgtgagatttacaaggacaaccggaacctgttcgaggtacaggagaatgagcctcagaagttggtggagaaggtggcaggggacattgagagccttctggacaggaaggtgcaggccctgaagagactggctgatgctgcagagaacttccagaaagcacaccgctggcaggacaacatcaaggaggaagacatcgtgtactatgacgccaaggctgacgctgagctggacgaccctgagagtgaggatgtggaaagggggtctaaggccagcaccctaaggctggacttcatcgaggacccaaacttcaagaacaaggtcaactattcatacgcggctgtacagatccctacggacatctacaaaggctccactgtcatcctcaatgagctcaactggacagaggccctggagaatgtgttcatggaaaaccgcagacaagaccccacactgctgtggcaggtcttcggcagcgccacaggagtcactcgctactacccggccaccccgtggcgagcccccaagaagatcgacctgtacgatgtccgaaggagaccctggtatatccagggggcctcgtcacccaaagacatggtcatcatcgtggatgtgagtggcagtgtgagcggcctgaccctgaagctgatgaagacatctgtctgcgagatgctggacacgctgtctgatgatgactatgtgaatgtggcctcgttcaacgagaaggcacagcctgtgtcatgcttcacacacctggtgcaggccaatgtgcgcaacaagaaggtgttcaaggaagctgtgcagggcatggtggccaagggcaccacaggctacaaggccggctttgagtatgcctttgaccagctgcagaactccaacatcactcgggccaactgcaacaagatgatcatgatgttcacggatggtggtgaggaccgcgtgcaggacgtctttgagaagtacaattggccaaaccggacggtgcgcgtgtttactttctccgtggggcagcataactatgacgtcacaccgctgcagtggatggcctgtgccaacaaaggctactattttgagatcccttccatcggagccatccgcatcaacacacaggaatatctagatgtgttgggcaggcccatggtgctggcaggcaaggaggccaagcaggtgcagtggaccaacgtgtatgaggatgcactgggactggggttggtggtaacagggaccctccctgttttcaacctgacacaggatggccctggggaaaagaagaaccagctgatcctgggcgtgatgggcattgacgtggctctgaatgacatcaagaggctgacccccaactacacgcttggagccaacggctatgtgtttgccattgacctgaacggctacgtgttgctgcaccccaatctcaagccccagaccaccaacttccgggagcctgtgactctggacttcctggatgcggagctagaggatgagaacaaggaagagatccgtcggagcatgattgatggcaacaagggccacaagcagatcagaacgttggtcaagtccctggatgagaggtacatagatgaggtgacacggaactacacctgggtgcctataaggagcactaactacagcctggggctggtgctcccaccctacagcaccttctacctccaagccaatctcagtgaccagatcctgcaggtcaagtattttgagttcctgctccccagcagctttgagtctgaaggacacgttttcattgctcccagagagtactgcaaggacctgaatgcctcagacaacaacaccgagttcctgaaaaactttattgagctcatggagaaagtgactccagactccaagcagtgcaacaacttccttctgcacaacctgatcttggacacgggcatcacgcagcagctggtagagcgtgtgtggagggaccaggatctcaacacgtacagcctactggccgtgttcgctgccacagacggtggcatcacccgagtcttccccaacaaggcagctgaggactggacagagaaccctgagcccttcaatgccagcttctaccgccgcagcctggataaccacggttatgtcttcaagcccccacaccaggatgccctgttaaggccgctggagctggagaatgacactgtgggcatcctcgtcagcacagctgtggagctcagcctaggcaggcgcacactgaggccagcagtggtgggcgtcaagctggacctagaggcttgggctgagaagttcaaggtgctagccagcaaccgtacccaccaagaccagcctcagaagtgcggccccaacagccactgtgagatggactgcgaggttaacaatgaggacttactctgtgtcctcattgatgatggaggattcctggtgctgtcaaaccagaaccatcagtgggaccaggtgggcaggttcttcagtgaggtggatgccaacctgatgctggcactctacaataactccttctacacccgcaaggagtcctatgactatcaggcagcctgtgcccctcagccccctggcaacctgggtgctgcaccccggggtgtctttgtgcccaccgttgcagatttccttaacctggcctggtggacctctgctgccgcctggtccctgttccagcagcttctctacggcctcatctaccacagctggttccaagcagaccccgcggaggccgaggggagccccgagacgcgcgagagcagctgcgtcatgaaacagacccagtactacttcggctcggtaaacgcctcctacaacgccatcatcgactgcggaaactgctccaggctgttccacgcgcagagactgaccaacaccaatcttctctttgtggtggccgagaagccgctgtgcagccagtgcgaggctggccggctgctgcagaaggagacgcactgttgcccagcggacggcccggagcagtgtgagctagtgcagagaccgcgataccggagaggcccgcacatctgcttcgactacaacgcgacagaagatacctcagactgtggccgcggggcctccttcccgccgtcgctgggcgtcctggtctccctgcaactgctgctcctcctgggcctgccgccccggccgcagcctcaagtcctcgtccacgcctctcgccgcctctgagcaccctgccccaccccacctccactcccacctcacccggcctcttcgcctttcccaccctcctgccccacactccccgccttagagcctcgtccctccctcactgaaggacctgagctggccaggccctgagagtctggtctgcgccttgggatggggagtcccaaagcgggacgccgcaggtgtttggcacccaaatcacatctcacctccgaactgttcaagtgtccccagacccttcttgcctgctgggctccccccagtgggatgggacagggaggccacacgcactggtgccaaaaccaggcctctgctgccgcccttcctggaggctgcctatgttgggggggaccctgcctcagctgacccggcctctctgccccacccaagcccaaacttggtttctgtgagaatagtggaggaaggtgagatggccagtttgaagcctgtgcctcccagcttaaatcctagcaggagagaggctctggggcagcccccatgggctcctgcccctttcaggcctacagccacatccccaagcccaccaggtgtcaggatagtcacagtgataccagttcagacactaccccatatacacctggaacattgaggatggaaactggactcacattcgacataccccactgggcacacgcacaaacacacacactatggggtggggtgggtgtaggggcttacaaagccttacacagggcgaggggttggtgggagggttggcacctgcacactccatctcctgctcaccacctgcctctaatctgagctgcagcctggctggtcctcccatttctaaagctgaatgtcaaacagtgccaaatgctggggcagggggtgaagaaccctctgtcccacccctagccaccagtgtcctccaagtgccccctcacctctccaggtgctcattgtaaccatttctcactagtgtcaggcccccagtgggaccacatgccactgcctgcacctttcggcagaggaacccccaccagacatcaccctttgccttagcaggggtgactttgtctctcctggctgggccatccttccgccaatctggcccttacacactcaggcctgtgcccactccctatctccttcccacccctacacacacactccctgcttgcaggaggccaaactgtccctcccttgctgaacacacacacacacacacacacacaggtggggactgggcacagctcttcacaccattcattctggtcatttcccccaaaggcatcccagcctgggggccagtggggaactgagggcaaggggatatagtgatggggctcagatggactgggaggagggggagggtgatgcattaattaatggcttcgttaattaatgtcatgttgcttgtcgctttctcagtgtgtgtgtgtggtccatgcccactgctggtgccagggtgggtgtccatgtgcacccggcctggatgccagctgtgtccttcgggggcgtgcgtgtaactgtagtgtagtcaggtgctcaatggagaatataaacatatacagaaaaatatatattttaagtttaaaaaacagaaaaacagacaaaacaatccccatcaggtagctgtctaacccccagctgggtctaatccttctcattacccacccgacctggctgcccctcaccttgggctgggggactggggggccatttccttttctctgccctttttttgttgttctattttgtacagacaagttggaaaaacaacagcgacaaaaaagtcaagaaactttgtaaaatatcgtgtgtgtgattccttgtaaaatattttcaaatggtttattacagaagatcagttattaaataatgttcatattttcacttc

SEQ ID NO: 7201 - DNA, 2032 bp, Homo sapiens
tttggagggaggaatcccttcctcccggtgatccttactcatattctagccaccaaccacggttagtgcttgcggattgccgtgcaggagccgagctgctgcccttgactggtgctcaggggaccacagctgcaatgacagtttgggcctgcaaaaagaaggctggaacaacgggagatggaagctttctgcaaatgcagcaccactggtatccatgaatttaacctgcccatcattcttcctaaacaagagactattgaaaagtcagggtgttcaaaatggcttcagatcttatcaggacaatcttggctgttgcactaatttccaaacttggcacagctgtagatgcagaactgatgccatctggtgcgattctacagaataagagagaaaatttacccagagtgtgccatgcactggcttttctgggaatggcaaggtgccaggatttgtttttggttcgcttgcaggggtggaaacttggaactaggttccaagatggtccccgcagcaccccacaagaagaaggaggaagcccacagagaaaacggggcatgccagttcaaatccacttccttttaaagagcttcctcagcagcccaataacttttgccttcatctcattggccagaactgtgtcattggctactgctatctgcaagattgtctgagaaatgtagtttttgtagctggatatataactgcctttgacaaaaatccagtttctcttgatgaagaagaagatgatggtggatcttgggaggacaactaacattttatgccctggctacagaatacagttgcagaggagcataaagttcaaaaagatcaaaactctagttccttcacaactgtcaaagctccaagcagcactgctcccctctgacagagtgagcagagtgaaggcatgtcaggtgttctcacaaaactcttgacagggctgacctctctcagtcaatatccttgtcccacatcaggattttctagagggccctgggtacctgtgcacttccttggtggccgtaacctctttgtggagggttggtgtaggataaagaatgttctattacgctgctccctcatctgtatcatttctctcctctctaattttcctgtcagttatattttggtggagtctgggtttgtgtatttgattcctatagaaagaccatcgctttcatgcatggaggaggggaatctacgcaaagaaaggctaccttactcctttctgtgactccaccaccagtctaggaatatcctgggagaagaattgcctctcaaagctgcttctataagcagcctacatcctagctaagcaaagaagaaacacttcccacatctagggctgtctaaaagaactttctgtgatgacagaaatgttctatatctgcagtgtccaatatggtaaccatataggcacatgtggctagtgaacacttgaaatgtggctagtgtgactgaggaaggaaaatttaaattttgtttaattgtaattaatttaaattcagatagccaaatggggctactagctattgtgttagatagcacggtatactttattctctttcttgtgttgtagaaccagctgggagaggtgtgggtcagtcatgggcttggtatcccctggtcttcactattctagcttgccattgaatttgtctcccagaggaaaagaaagaatggtatttggaattaaattcaagatgttaacttgacatctatatattgcacatattcctgtatagtgaatggatgacctcctgggaatagttcctgtgactgattttagtgataattgatcatgaagaaatggcagtactgctccacttcaccttcctagtgactattatgtgttcctagtcagagtgactcagcagagattattttgttctcttgtgcaatttattctgtgtcattttatttttgtaatattgtggcagctaaatgattattctgtgtatgtttttcaaaatattaggtggcttatattttttaaaaggctatgaaataaaaataaactatacgtaacaca

SEQ ID NO: 7202 - DNA, 5583 bp, Homo sapiens
ggcactgggggagaccagagcgaggggagcgagaggcgcggagagtttggcaggcagacccagaaatccctggagcgcggcggacccggcggccggaggggcgaccccgcccgatgtaacgcgccccgcccgagccccggcccctgcacggggggggtgatgtgagcagagcccaggaatgccttatgtggatcggcagaaccgaatctgtgggtttctggacatcgaggagcatgagaacagcggcaagtttctgcggaggtacttcattctggacacccaggctaactgcctcctctggtatatggacaacccccagaatctggcaatgggggcaggagctgttggagctttgcagctgacctacatctcgaaggtgagcatagctaccccaaaacagaaaccaaaaactccattttgctttgttatcaatgccctgtctcagagatatttccttcaagccaatgatcagaaagatatgaaggactgggttgaagccctgaaccaagccagcaagatcaccgttcccaaaggtgggggcctacccatgaccactgaagttctcaagagcttagcagctcctccagccctggagaagaagccacaggtggcctacaagacggagatcattggaggggtggtggtccacacacccatcagccagaacggtggggatgggcaggaagggagtgagcccgggtcccacaccatccttcgaaggtctcagagttacatccccacgtcaggctgccgtgcttccactgggcctcccctcattaagagtggttactgcgtgaagcaagggaatgtgcggaagagctggaaacgtcgcttctttgcacttgatgactttaccatctgctacttcaagtgtgagcaggaccgagaaccactgcgcaccatatttcttaaggatgttctgaagacccatgaatgtctggtcaagtctggtgatctcttaatgagggacaacctgtttgaaataataacaagctccaggaccttctacgtacaggcagacagtccagaagacatgcacagctggattaaggagattggcgcagctgtccaggccctcaagtgccaccccagagaaacgtccttttctagatccatttctttgacccgacctggaagctccagcctttcaagtgggcccaactctatcctgtgcagggggcggccacctttggaggaaaagaaagccctctgcaaagccccctctgtggcctcctcctggcagccctggacacctgtcccccaggctggggagaagctgcttccacctggagacacttcagaggactccttgttcacgcctcgtcctggggagggcagcgcctcctggggtgctgcccagctcccggataaggcacagatcggagccccagcaccccaaggagaagccgtttatgttcaaccttgatgatgaaaacatacggacctctgatgtgtgatggagcacagtgccatgggagggagggagggagggaggacttgagagaaggaggctgtgactcagtttctctaccttgttggagggtagtcagaggcctttatgtcactcatattcctgtggatgctctttgggagggaggggcccatccagctgggctgtgtgtgtgtgtgtgtgtgtgtgtgtgtgtgtgtgtaatatcaacgcagtgtatttaatttggggaagtcactaggttagaactgtaggcatactcagtggagaggaagctacctattctattctaactattctgaggtcttcctggagagggattgttttagcagctcctctccagagggggctggaagtccagtttcaccaatgaccaagttttatttccttgtccttgttttagttttttcattttgttttcagtccaggtgcctcgcagctcttttggaatgggccagcattagtctaattttaagcgctatgtgttttgtacccttgcaaacttgctttctctttcttcttgctgttgccctttgaatgaagccttgtgtgcttgcatgatcagaccctgtaataggatgaatttccatgcacttaacatgaagagatacaaaaagaatctagagagagatatatatttttaatgaaatagaagcttggcatagaaacattgatttagatgttatgagttgctggccagagattcctcagataaaagagcctagaaaattgagttttgagcgggcatggtggctcacgcctgtaatgccagtagtttgggaggctgaggcgggtggatcacctgaggtcaggagttcgagatcagcctggccaacatggtgaaaccccgcctctactaaaaaatatgcaaaattagccgggcgtggtggtgcaggcctgtaatcccagctactcagaggctgaggcaggagattcacttgaacccaggaggtggaggttgcagtgagccaagatcgcgccattgcactccagtcagggcaacaagagtgaaactccgtctcaaaatataaaagaaaattgagtgtcccacccaaattttagggcgtacctccttccatttgataagaagatgctatttccagtgtccctgggagaattcttccatccagtttatatggtgaattgccaccagcgttccctaaaggaagagagaacttagcttatttctgtctgtgacttttatcagctagatcagttaattgtatttttaaattaaaaattagtaactagaggaagagactaagagaactatttttacctgagtaaatgctctcctcttcttgtgtccaaatctaatgcagaggtgaaaacacttgatgagaaaatcctttgtggcttgaggggaatcatgtttctttcaggacgtgttgtttccctgaagtctatgtcacactgagaactttttctgactgcactgctttggagctattcatttaaattgagtttggcctagttttcctggtataaaacaggaaatctacattgttccctctttctctcccttccatcccttcccctgcctttcctatacacgctggtgtgcttttgccctcagaaattcttggtttgggagttatgtatttttgagtgatcgaggttatgacatacttggagcggcatgatttcaagaagccattccaaattcttatagctccttagctctggttttactctcgtattttccccaagaaaattttttggctattcaaagaaagcacaaaatatgtgatgtggaactcatgaaaatagggacttttgatatctctttaaatattccctgactcacggaaaagatgtcctcttttggtgtatacattgtgaaaatctacccatttatctctctctctctcttttcttttaaataaattatctgataaggccggcaaggtggctcacgcctgtaatcccagcactttgggaggccgaggcgagcggatcacgaggtcaggagatcgagaccgcggtgaaaccccgtctctactaaaaatacgaaaaaaaaattagccgggcgcagtggcaggcgcctgtagtcccagctacttgggaggctgcggcaggagaatggtgtgaacctgggaggcggagcttgcagtgagccaagatcgcgccactgcactccagcctgggcgacagagcaagactccatctcaaaaaaaaaattatctgataggttactattgctaaattaattggccattataataagctgatttgtttcttattcagcaagatctcttttgagaatgtgacaaattaaacatacatagaatccatatggtattatcctgataaagggaaacgaggacactaagactgtcaaatggaaatcttcttgtcaattggcaaacacttgggaattccacattagagcattgcttgtttttaattttttttttttaatttttaaaagacagggtctcactctcttacccaggctagagtgcagtggtgtgatcatagttcatcataactttgaatctctgggcttaagcaatcctcccatgttagcttcccaagtagctaggactacagggttgtgctaccacgcctggctaatttttaatttttttttatctacagagcctggctatgttgcccaggctctctcaaactcctggcccaagtgatcctcctgccttggcctcctaaagtgttgggattacaggtgtgagccactgcacctagccagaacatcgttaatgtagttcaatatgagataaattattatcttcaatgaaacaagctctaaaagcattccattcctaaattgtatttcaaacttcctattttgttgatatttcttaacttctggccagttttggaccataatcttttaatgtgaaccaaagatggtacgtatttgaccaaagcagttagttttaaatgtataaaattgaaccaaatggaaaaaataggttggggatgcagtatagattagtgactaagtgcataggctctggagtaaatctgagtttttttttttttaaaggaactaaaaaatgtactgcattttctttgtggaataaaagccttgcctgagttgtgctattttcataaggcttttgaagtggtcttgacccactgtgtgtaacagtatttcaggtggtcctccccatggctgaataatgccatccattattctttaatttttatttttagaaacagtgtttcactctgtcacccaggctggagtgcagtggcctgatcatggctcactgcagcctggacctcctgggctcaagtgatcttcctgcctcacagcctcccaaagtactcagattataggtgtgagccaccacgcctggccaccatctattacttttgaaatcttcaaaagacttgcttactcaatgtcagctgatggttggtaaaaataatttggcctttagtgttaagtgagacatcataagggtattgaggtatacattatggagattgatgtcaggtcagaatattggagttatacatctatttctgagttgaatactcagctcccacgagaaagaaagtagttttaaggtccagcttcttagtctacttgaagcaaattttttttcttttatatttctgaatataaatatactcttatatgggctaaaaagaccccatgaataaatagcaggttcagtagttgaggagtggagtttagtaggtttgttttcagtataaattagataacatgtggaggtcacagcattttggaaattgagtgtccccaagtgagctttgtttataaactttcaaaatgtcggaagtggacaggtttgttaaatcttgtctgccagcacccttttcttcctttgttccttttcctctctgtgttattgcctgcggcagccagtccttcatactagatagagttcagataaagcaaacgtttggcaaaaacatactgtttgacctcctccccctctgcttatgaaggggtagcatgattctgtgttttaaagcagtgatgtttcagctgtgaaatgcactcgctgtaagctctaggctgagtgcatggaaactgttacgcttctcattttatgtgatctcctaattggtatgtagcaaaaattttctaaaactgttttgtggcttgttttgtaataaaaccatgtgaaatactg

SEQ ID NO: 7203 - DNA, 6250 bp, Homo sapiens
ctgaattccttctctgtggcatatgctttaggagaggagcagacagctcttagctagggtcagatttcaaattctcatctcttggtgccaataccaccaccagattcttctttgaagtcaacttttgagatcttcactaagtacacgttggtgtctgaagattcacacgagtgcctctggtaatcattttcttcagggaatcacagtctctcctctcagcaaagcatccactgtactgaactttgcttttggaaacatcttcttcctgagacctcgttgaaagaaactctctggtgtcatactttccaatatggaggtgaagaactttgcagtttgggattatgttgtatttgcagccctctttttcatttcctctggaattggggtgttctttgccattaaggagagaaaaaaggcaacttcccgagagttcctggttgggggaaggcaaatgagctttggccctgtcggcttgtctctgacagccagcttcatgtcagctgtcacggtcctggggaccccttctgaagtctaccgctttggggcatccttcctagtcttcttcattgcttacctatttgtcatcctcttaacatcagagctctttctccctgtgttctacagatctggtatcaccagcacttatgagtacttacaactacgattcaacaaaccagttcgctatgctgccacggtcatctacattgtacagacgattctctacacaggagtggtggtgtatgctcctgccctggcactcaatcaagtgactgggtttgatctctggggctctgtgtttgcaacaggaattgtttgcacattctactgtaccctgggaggattaaaagcagtggtgtggacagatgcatttcagatggttgtcatgattgtgggcttcttaacggttctcattcaaggatcaactcatgctgggggattccacaatgtattagagcaatcaacaaatggatctcgactacatatatttgactttgatgtagatcctctcaggcgacacactttttggactatcacagtgggaggaacttttacttggctcggaatctatggggtcaatcaatcaactattcagcgatgcatctcttgcaaaacagaaaagcatgctaagcttgccttgtattttaacttgctgggtctctggatcattctggtgtgtgctgtcttctctggcttaatcatgtactctcactttaaagactgtgacccttggacttctggcatcatctcagcaccagaccagctgatgccgtactttgtcatggagatatttgccacaatgccaggactgccaggactttttgtggcttgtgccttcagtggaactctgagcaccgtggcttccagcatcaatgccttggcaacagtgacctttgaggattttgtcaagagctgttttcctcatctctccgacaagctgagcacctggatcagtaaaggcttatgtctcttatttggcgtgatgtgtacctctatggctgtggctgcatctgtcatgggaggtgttgtgcaggcttccctcagcattcacggcatgtgtggaggaccaatgctgggcttattctccctgggaatcgtgttcccttttgtgaattggaagggtgcactaggaggtcttcttactggaatcaccttgtcattttgggtggccattggggccttcatttaccctgcaccagcctctaagacatggcctttgcctctgtcaacagaccaatgtatcaaatcaaatgtgacagcaacagggcctccagtactatccagcagacctggaatagctgatacctggtactcgatctcctacctttactacagtgcagtgggctgcttaggatgcattgttgctggagtaatcatcagcctcataacaggtcgccaaagaggtgaggatattcaaccactgttaattagaccagtttgtaatttattttgcttttggtctaagaagtacaaaacactatgctggtgtggagttcagcatgacagtgggacagagcaggaaaaccttgagaatggcagtgcccggaaacagggggctgaatctgtcttacagaacggactcagaagagaaagcctggtacatgttccaggctatgatcctaaggacaaaagctacaacaatatggcatttgagactacccatttctaaggcaatacctgtatgaatgcacacacacacgtgcaatacacacacacacacacaaactccacatacttcttgcctacttgttagtagatatgtatagttgccattgctagaagacagggatgtctggtgcctatttctacttatttataactacatgcaaaatgactgtctctcgggatattctttgaaagactccaactttcacagagaaaaaccaacctgctccaaatgcccttgactacttccttcttgaataaattagggctggatttcattaccattcaagaaagcgaagtctttttgcttggtgtcatattaaacttcaggtttttcgttttagtagttttttaaccatcaaaatatcttggagtttagaggcagaacgggaaacagaaatatgcatatttaacactttcctgccacgagggataaaatagaggaatgacatccacccctgacctcatacctgacatacatgtagatatattttatgccacccatctcccatcctgtagctacaattggcatacaactactattaacctcccttcaccaccactgtcaggtcctcttccagtcattccagtcattagctgtcctgaccaaacattaaaaaaaaaattcagctaaatacagaagaagatggtatgtctggctagtgggagtgattataactaaaaactttgctccttttgtgctgtccatgcagtatgtcttcttcctttctatcactttacaatgaaaaattgcctcagagctcaataagaagtctagagcctttttccagggctaaggaaagagaaaaggaatgtcctatagaaggttgttaggatagaatttggtaaaagaacgttgcaaatattgtaacagaccataggagatttcatcagcaataggattcttctttggagaaaatacattgtccataagacttgtactctgctcattcaactcatgtgagcaagctcaactcactccacctgggttaggtaacagaagtggagaacttcatagttcgtgtctagaaaataatgtttaaagttctggagaatgagggtattgcagattaaaaggcgagttgacaaatgaaggagcagtgaaagatttttggaagaagtgaagaagtgaaattctgaaaaggtaaaagaaagaaccagtatgtcacaggggccaagtcagaggacagataataagaaacaaagttgtatctgagagtcatatattaggacaggtgtcagatatttattttggtggccagataaaagcaaaaggcctagaaacagtgtgttagcaaagtaagaagaaatggtccaaataggcaaggataaggaaatccaaaggttgtctttaaatatttctcaaaagagaaagccttgaaagaagcatacaatagagaaaaaataaattaccagtatttattattagaaaagatagaaagacagacaaatcagtggaggaattaaaacagagaaactggagtttataaaacagagcccaatccttgccttctctccctccactcaaatagaaaaggagaatggagaaagagaaagaaggtattaggctacagtttataagagagatgagaaaaaaatacatttgggaatagagggaaagggtcaaaaggggtcacatttggagaaatatctgaaaatgagaaggagcagaatttttggaaacattttttaaagtctggcaacgctaattaagctgttgatctaaggatttgcaaattgagaggtgcaattattttccaaatgatttgtgacactcttattaattagaatatatattttgtgaatattgaaatctgagccaaaactagttagctttattaatatcttagggaaagaagagagaaagaaagagggagggagagagagaaagaaagaaagaaagaaagaaagaaagaaaagaagaaagaaagaaagaaaaagacaggaagaggaagagagagacagaaagaataaaaaaacagcaattctgaggatgagaataaattaatggtaggtattacatatgcatatacatatatatatctgtacacatatatatgtaaatatgatttggaatacatcaggattgtgaacttccacttgggatagcataaaagcaaaatataccatacaatttttcattttactcacaaattttactcacaaattctcctaaagacatttcactaggtcagtacatttccgagaaagttttaaaaacgtttcttcttttatagtccctaattatcttacctggagtgttatcaaaatgtcatacaactggaaaatgcaattattattataaaaatatctctgccttctcttgtgtaatgaaatttatggcattaggagatgacatttcaagagattttagaggtcaatgtagagactccccccattcttcttaattgaacaaacatgcataaatctagggtttcaggtagagagcagatgggaatctacaggaaactgtcttccatagtgtatgaaaaccgtgtttgttgtgtggtgaagcaaaaggaaactatgaagcgcacagtcaatagattcagctagtgagtcccagcactcctttcaggccctcactaggattagcagcccagagtcatgccaaggccactggtgcagtacaaagacagttcagtgacaagttccatccataccatggaagagggttaaacttgtggctgtttttgccacagcatgaccagagacattctcaataaatggcactaggaatgatgagttttagaggggcctaaaatgttccaaacttgatactcaccactgtacctttaaagcacaaccacagatattggtaaaaatggaacagaattacctcaatacctctttaactcattctgtatgaattcattttgatgacagacattttttgtcaccatttggaataagaactacaacagcttatgattgaggtgaggaactgcagtcaaatggcttaggttcaaacacgagttctgacacaaatctaggtaattttgggcaatattttaaaatcttagtttattcaccaattaataggagtaaaaattacccctacttaatagaattattatgaagatttatataagtaaatcatataaagtgcttagcacagtgtgactggcccacatggaacatttaatacttggtctgcagtatatgaagaaaatggtgtacatgttaacttaaatggtttcattatttctcttcaggatttttaagatgtgggatcagaatatatgttactattttgagaattagaaataataagaaaaacagaatgtatacattaaaagtcatgcctaaatttccaaagagtagtttttttaatgccagagtttaaataaaatattattttccagagagtaacttttctaaaggtcctaaattctgaaaagagagaaaactactgttataaacaagtttattactaaaagatgcaattcattactatgatttattattattttgtacatgtaaaccttgataaataaacagcatctcaacccaagtttattactcattgcacagttcaaagcaactatgactctcaaaatagcaacagaaggtggggagggtcttttccctttgtttatatagtatttgctaaaaatgaactttactattttgtggctttatagggttacaccatttcattctaaagagaaacaaaaagtaaaccattggccatgtggctttcaaacagtatttcaaagagaatattactgaaatatttttgtgctgttacagtcttaatcaaacattattacaaagatcagatacggaaaaaatagaggagtctccccttaattgttccctttgaaataaattgttttaaattattacagaagttatagctgtatgtacatgcacatttgtatatttacaagtctcatgtacttaatctcaatattgcaaattagctaggtttactatagagttaactgcttttatctagcatttataatcttgtagtataacctattttcaaataactaaaatttaattgatgtcatcaatggtacacatgaaaatgatacaaatttataaactaataaaatgtaactcgtcattgatagtaaat

SEQ ID NO: 7204 - DNA, 1096 bp, Homo sapiens
gcactcggagcccggcggggaccgggaggcagagacggggcggccgtggctccgagggcgggagctgagccgggccccgggaccgaagtttggcggcggctccgggaggcagagcgggctccccgggcgacttccaggcccctctcgcgtcctcgccccggacccgtgggcagccggggggaacggaagccgcggccgggccaactccgaggcggggacgccgcgacgggaacttgagggagcaggctgcctaatgaaggagccaggcttgcacacagacaattctagaactggtggcccgagagggatgtgaaggcccaaaatgaccctcttaccgggagacaattctgactacgactacagcgcgctgagctgcacctcggacgcctccttccacccggccttcctcccgcagcgccaggccatcaagggcgcgttctaccgccgggcgcagcggctgcggccgcaggatgagccccgccagggctgtcagcccgaggaccgccgccgtcggatcatcatcaacgtaggcggcatcaagtactcgctgccctggaccacgctggacgagttcccgctgacgcgcctgggccagctcaaggcctgcaccaacttcgacgacatcctcaacgtgtgcgatgactacgacgtcacctgcaacgagttcttcttcgaccgcaacccgggggccttcggcactatcctgaccttcctgcgcgcgggcaagctgcggctgctgcgcgagatgtgcgcgctgtccttccaggaggagctgctgtactggggcatcgcggaggaccacctggacggctgctgcaagcgccgctacctgcagaagattgaggagttcgcggagatggtggagcgggaggaagaggacgacgcgctggacagcgagggccgcgacagcgagggcccggccgagggcgagggccgcctggggcgctgcatgcggcgactgcgcgacatggtggagaggccgcactcggggctgcctggcaaggtgttcgcctgcctgtcggtgctcttcgtgaccgtcaccgccgtcaacctctccgtcagcaccttgcccagcctgagggaggaggaggagcag

SEQ ID NO: 7205 - DNA, 1633 bp, Homo sapiens
aagtatcaaggcctcaagtctggcacatttttctggccaggatcagatgtggaaattaacggaattttcccagacatctataaaatgtataatggttcagtaccatttgaagaaaggattttagctgttcttcagtggctacagcttcctaaagatgaaagaagaaccagattcttcaggtcattcatatggaccagtcagcagtgaagtcatcaaagccttgcagagggttgatggtatggttggtatgctgatggatggtctgaaagagctgaacttgcacagatgcctgaacctcatccttatttcagatcatggcatggaacaaggcagttgtaagaaatacatatatctgaataaatatttgggggatgttaaaaatattaaagttatctatggacctgcagctcgattgagaccctctgatgtcccagataaatactattcatttaactatgaaggcattgcccgaaatctttcttgccgggaaccaaaccagcacttcaaaccttacctgaaacatttcttacctaagcgtttgcactttgctaagagtgatagaattgagcccttgacattctatttggaccctcagtggcaacttgcattgaatccctcagaaaggaaatattgtggaagtggatttcatggctctgacaatgtattttcaaatatgcaagccctctttgttggctatggacctggattcaagcatggcattgaggctgacacctttgaaaacattgaagtctataacttaatgtgtgatttactgaatttgacaccggctcctaataacggaactcatggaagtcttaaccaccttctaaagaatcctgtttatacgccaaagcatcccaaagaagtgcaccccctggtacagtgccccttcacaagaaaccccagagataaccttggctgctcatgtaacccttcggtaagtatcgtcaagaagtttggtccagtatgtatggtttgatagcaccctctgcatagcatgtgctgtaaaaatacttaataatcaaattagaatttaggagtgggggtaggtaaacatatgttttaattctagggggcgcatgtagatcttttgtgatatatcttttctctttctagtttttgcattttccactctatttttaattccttggagctgtgacttgacttgggtgcaggtgtggtgaagtctagttagttgacttgggtacgggtgtggagaagtctagttcagttcttgagcatcctgaattagggaatctgtgctgttaactctagcagtgaggtgatgagcacatagtaaaccaatcacaatgtacctttttaaaaatacaattcagattgtttaaatgtagggagaaaaaagatttcttggtatgaaatgaatatattacactgtccttttttacttccatgttaatatgtcattattataaaaagataaaaatactagacaagttatgaacaaaattgataacatccatgagggcacctgtaatcccagctacttgggaggctgaggcaggagaattgtttgaacctgggaggcggaggttgcagtgagccaagatcacaccatcgcattccagcctgggcaacagggcaagaccctttctcaaaaaaaaaaaaaaaaaaa

SEQ ID NO: 7206 - DNA, 614 bp, Homo sapiens
gagaccaagggctaaagctgggaggtgagtctgtcaccttgagccgggcgagcgctgtgggccaagcaggggttgcagggtagtaggagtgcagactgaaaaaatgcagaccgccggggcattattcatttctccagctctgatccgctgttgtaccaggggtctaatcaggcctgtgtctgcctccttcttgaatagcccagtgaattcatctaaacagccttcctacagcaacttcccactccaggtggccagacgggagttccagaccagtgttgtctcccgggacattgacacagcagccaagtttattggtgctggggcagccacagttggtgtggctggttcaggggctggcattggaaccgtgtttggcagcttgatcattggctatgccaggaacccgtctctcaagcagcagctcttctcctatgccattcttggctttgccctgtctgaggccatggggcttttctgtttgatggtcgccttcctcatcctcttcgccatgtgaggctccatgggggggtcaccggcctgttgctactgcaactccacaccattcttggtgctggggtgtgttaagctttaccattaaacacaacgtttctcta

SEQ ID NO: 7207 - DNA, 5075 bp, Homo sapiens
acttcgcctcgcagctccccttcccatcaccgccccctgctcctccccggcgtctgcgattttcccaggcacccggtgtgagtgcggcgtgcgtgtgagtgtgtgtcagggtattgtgttgtgggagagtgtgtgagtgtgtgtgagtgtgtgtgtgcatgagtgtgtggagtgcggggctcctgcgctccgctcgccgccgccgccggggaaggacagacggacggcgcttcctccttcggcgagcggttcccgggcacctcggcttggcccgggcgcgagtggagcgcgcctggctggccgccggcctcctgaaggtcccgttgcgtaccccctgggctggatatgttcatgttcacgtgaagatggatttactgtacggtctcgtgtggctgctgacagtcctcctggaggggatctctggccaaggagtgtacgctcctcccacggttcgtattgtgcactcaggcttggcctgtaacattgaagaggagcgctactccgaaagggtctacactatccgggaaggagaaacccttgagttgacttgtctagtcacaggacatccacgtccacagatcaggtggaccaaaacagcaggaagtgcctctgacagattccaagactcaagtgtcttcaatgagactttgaggattacaaatattcagcgacaccaaggaggccggtattactgtaaagcagagaatggcttggggtctccagcgataaagtcaatcagagtggatgtatactatttggatgatccagtagtaactgttcatcaaagtataggtgaagctaaagaacaattttactatgagagaacagtgttcctccggtgtgttgccaattccaatcctcctgttcggtatagctggagacgtggccaggaggtcttgctgcaaggatctgataaaggagttgagatttatgaaccattctttacccagggtgaaacaaagatcttaaaactaaagaatcttcgacctcaggactatgctaattatagctgcattgcttcagtgaggaatgtatgtaatattcctgataagatggtgtcgtttagactgtccaataaaacagcatcaccgtcaattaaactcttggtggatgatcctatagttgtaaatcctggagaggccataacattagtatgtgttacaacaggaggagagcctgcaccttctctcacctgggtcaggtcctttgggactctgcctgaaaagactgttttgaatggaggaactttgaccatacctgccatcacctcagatgatgctggtacttacagctgcattgccaataataatgtgggaaaccctgcaaaaaagtccaccaacatcattgtgagagcattaaaaaaaggacgattttggatcacaccagatccttatcacaaagatgacaacatccagattggccgtgaggtgaaaatatcttgccaagtagaagctgttccttctgaggagctaacatttagttggtttaaaaatggtcgtccattaagaagttctgagcggatggtcattacacagactgatcctgatgtctctccgggaacaacaaacttggacatcattgatttaaaattcacggattttgggacgtacacatgtgtagcatctctgaagggaggaggaatatctgatatcagtatcgatgttaatatatccagcagcacagttccacccaatctgactgttccacaggaaaaatcaccattggtcaccagagaaggagacacaatagaactgcaatgtcaagtaactggcaaacctaaaccaatcatcctttggtctagagcggataaagaagttgcaatgcctgatggatcaatgcaaatggagagttatgatggaacactgaggattgtgaatgtatctagggaaatgtcaggaatgtacagatgtcagaccagccaatacaatggatttaacgtgaaaccaagggaagccttggtgcagctcatcgttcagtatccccctgcagtggaaccagcattcttggaaatccggcaaggacaggatcgaagtgtcactatgagttgcagagtactgagagcctatccaatacgggtgctgacctatgagtggcgcttgggcaataaattattacggacgggtcaatttgactctcaggaatacacagagtacgctgtgaagagtctttccaatgaaaactatggggtttataactgtagcatcataaatgaagctggagctgggagatgcagctttcttgttacaggaaaggcctatgctccagaattctattatgatacctacaatccagtatggcagaacagacaccgtgtttattcttacagtctacagtggacacagatgaatcctgatgcagtggatcggattgttgcataccggttgggcatcaggcaggctggacagcagcgctggtgggagcaggagattaaaataaatgggaatattcaaaagggagaattaattacatataacttgacagagctaattaaaccagaagcttatgaagtccgactgactcctctcaccaaatttggtgaaggagattcaacaattcgtgtgatcaaatatagtgctcctgtaaatcctcatttgagagaatttcattgtggatttgaagatggtaatatttgtttgttcactcaagatgatacagataattttgactggacaaagcaaagtacagcaacaagaaatacaaaatatactcctaatacaggacctaatgctgaccgtagtggctccaaagaaggtttttatatgtacattgagacatcacgacccagattggaaggcgaaaaggctcgacttctcagccctgttttcagcatagctcccaaaaacccttatggacccacaaacactgcatattgtttcagcttcttttatcacatgtatggacaacatataggtgtcttaaatgtttatctacgtttgaaagggcaaacaacaatagagaatccactgtggtcttcaagtgggaataaaggacaaagatggaatgaggctcatgttaatatatacccaattacttcatttcagctcatttttgaaggtatccgaggtcctggaatagaaggtgacattgctattgatgatgtatcaattgcagaaggagaatgtgcaaaacaagacctagcaactaagaattccgttgatggtgctgttgggattttggttcatatatggctttttcccattatcgtcctcatctctatcttaagtcctcgaaggtgaccttatcctggcagaggctataaaagattcaccaggcactggcatgaagaaagagtctttgtaaatggacattgaacaaacaaactaccaaagattcctccactgactactgactcaaaaataaaataataaaaacaaatttttttaagcactggggataaaaagacatcatggaagtataacttattccagactaaacataaaagataatcttgacctgagtagagaagagaccttcaggtgcttttgtggctaaaaagattacagcgtcatctggttgaactctggaaaaaaaaaaaaaaatgaaaaaaagaaaaaaaaaagagctatagaaatccttgtcaaagcacaaagtcatggctggttttgtttcaaatgaatagtttgcttgttaccatggaaacctaatggcctgccaacaaaaacctcactgtaaacagggtacgtgaagagctggcatttattttccttacgagaaggttttcgtagagaattaaataaatgtaggcccttttacctttggctgttacccttccttgaaaataacccgaactcagaattatttaaagcattcatgtttctccccaccttatccccatcccacctttattattattatttttctcccatggctaagctagataactgtatgctgtctctttttgcatgcactactatccaggatggtaaacctgggcttacatgttacacaggcttatcggagtttgcttgcggccacttgaacacccaaactacgtcatctgttccaatgaagaaaccaaaccaccatcttttataaattgccatggaaaccaagtgccttcaatgaaacaagcctgaataattttcaactcagaagcttgcactgctaagagtggtttgtgtaaaactattttataaacaaactacagagcctaaatgtgcaaattacaggcaagacaacaaagccgcttctgaagaagaaaggaccgaagctgctgcgtaagcccatgcagacaagatatttgttgtttaacctcctagacagccatggcctttcggcttattgtccattagaaaatcacttccattgagaccagacatggagcaacactttttttcttccaggttattaaatgggtcaaccagagcaaaaggttattaagaatacttagtgcagaaggtggtaaaacacaaaagtgatttttttactctaacctccatttgaaatgaaattggccctagctttagagggaacaagaaaatgtttgggattgcagtgcatactaactctacagtggaactgggcctgaaaaatctggctttattctaaactctgagggtaatatgcctctgccctttagtcagactctgtgcaaattgtgaaatattattttattattttaccaagattataaaaacacttttacaaaaaaacaaaaacctgtaaaaataattttgagctacctgacgacaaatcatatctttaaccagccagttttccaatgcattgtaaatttcacttaaacctgttggttatgaaaatttgaagatcattttccttaaattatctcagcttttaacttcatttaaaaagacttttgtctaagaagaatattattattatatgttctttcaacaccccaggattaaaaaaactgattatgcaagcaattggaatataagtattaaattatagcatttgcaaatattaatataaaagcacaacaaaatgtagtggaaaatgacaaagcttgttttttaaaacaattctgtagaaatgtttgtgcaaattcagtaattcaacttaaaatataattttacagctatgttcaataaagcctctttccaggtaaggta

SEQ ID NO: 7208 - DNA, 572 bp, Homo sapiens
agaggcgagagccagcctccggcaggagggcgtagaccccggtgccagccagaacggctccagccttcccgcggccagagagccagcggcgggaggggacgggcgggacctccgcggacagccccgggtgcggaccagcgggcagcggccggcgagaccctccctggatccgcccagagcttaccggaccctgcgcgcccccgtcccggctcccggccggctcgggggagaaggcgcccgaggggaggcgccggacagatcgcgtttcggaggcggcgcagtttccaggttaactaaggtctcagctgtaaaccaaaagtgagaggagacattaagattttcattcttaccgggttgtcttcttcctgaagagcaatggagccgcttttacttggaagaggactaatcgtatatctaatgttcctcctgttaaaattctcaaaagcaattgaaataccatcttcagttcaacaggttccaacaatcataaaacagtcaaaagtccaagttgcctttcccttcgatgagtattttcaaattgaatgtgaagctaaaggaaatccagaaccaac

SEQ ID NO: 7209 - DNA, 623 bp, Homo sapiens
gggctctggaggacctggaagataccctatgaggtctgtagggagccctcaggaaaggtctgctgacgaggagaagaggacaaagatactcagagagaaaaagtaaaagaccgaagaaggaggctggagagaccaggatccttccagctgaacaaagtcagccacaaagcagactagccagccggctacaattggagtcagagtcccaaagacatgggcttgttagagtgctgtgcaagatgtctggtaggggccccctttgcttccctggtggccactggattgtgtttctttggggtggcactgttctgtggctgtggacatgaagccctcactggcacagaaaagctaattgagacctatttctccaaaaactaccaagactatgagtatctcatcaatgtgatccatgccttccagtatgtcatctatggaactgcctctttcttcttcctttatggggccctcctgctggctgagggcttctacaccaccggcgcagtcaggcagatctttggcgactacaagaccaccatctgcggcaagggcctgagcgcaacggtaacagggggccagaaggggaggggttccagaggccaacatcaagctcattctttggagcg

SEQ ID NO: 7210 - DNA, 435 bp, Homo sapiens
cctttcgaaagttgttgggaacgtggactttcccaacaattgtgtatgcgctcgatctcactcagtgggagccgccgccctggagggaatttcacaatagcctgaactcccccactggaaaggattctgaaagaaatgaagtcagccctcagaaatgaagttgactgcctgctggctttctgttgactggcccggagctgtactgcaagacccttgtgagcttccctagtctaagagtaggatgtctgctgaagtcatccatcaggttgaagaagcacttgatacagatgagaaggagatgctgctctttttgtgccgggatgttgctatagatgtggttccacctaatgtcagggaccttctggatattttacgggaaagaggtaagctgtctgtcggggacttggctgaactgctctacagagtgaggcgatt

SEQ ID NO: 7211 - DNA, 800 bp, Homo sapiens
cggagaccagcctacagccgcctgcatctgtatccagcgccaggtcccgccagtcccagctgcgcgcgccccccagtcccgcacccgttcggcccaggctaagttagccctcaccatgccggtcaaaggaggcaccaagtgcatcaaatacctgctgttcggatttaacttcatcttctggcttgccgggattgctgtccttgccattggactatggctccgattcgactctcagaccaagagcatcttcgagcaagaaactaataataataattccagcttctacacaggagtctatattctgatcggagccggcgccctcatgatgctggtgggcttcctgggctgctgcggggctgtgcaggagtcccagtgcatgctgggactggcaactaaaaggactatgtttcccccttttctcgaggaccacgtttgctttttttccctgaatccacagttcttcggcttcctcttggtgatattcgccattgaaatagctgcggccatctggggatattcccacaaggatgaggtgattaaggaagtccaggagttttacaaggacacctacaacaagctgaaaaccaaggatgagccccagcgggaaacgctgaaagccatccactatgcgttgaactgctgtggtttggctgggggcgtggaacagtttatctcagacatctgccccaagaaggacgtactcgaaaccttcaccgtgaagtcctgtcctgatgccatcaaagaggtcttcgacaataaattccacatcatcggcgcagtgggcatcggcattgccgtgg

SEQ ID NO: 7212 - DNA, 2688 bp, Homo sapiens
gcggccgcggggggtggggggtgggaggccgggagggggccgggacgccgggctccggggcgggggcggggggcgcgggcaccggcgaccccggtggcggcggcggcggccgggggaagcctcggggccggtcatgcggctgcggggcccgcggcccggagcgtccgcccagccctgagcgaggccccgcagggcgccccctgcctctgaggatgagtcactgcagcagccgcgccctgaccctgctgagcagcgtgtttggtgcgtgtggcctgctcctggtaggcatcgcggtcagcactgactactggctgtacatggaagaaggcacagtgctaccgcagaaccagaccaccgaggtcaagatggccctgcacgccggcctctggcgagtctgcttctttgcaggtcgggagaaaggtcgctgtgtggcctcagaatattttcttgaaccggagatcaatttggtgacggaaaacacggagaatattctgaagacagtgcgcacggccacccccttccccatggtcagcctcttcctcgtgttcacggccttcgtcatcagcaacatcggccacatccgcccgcagaggaccattctggcttttgtctctggcatcttcttcatactatcgggcctctccttggtggtgggcttggttctttacatctccagcatcaacgacgaggtcatgaacaggcccagcagctctgagcagtattttcattatcgctacgggtggtcttttgccttcgccgcttcctccttcctactcaaagagggggccggcgtgatgtccgtgtacctgttcaccaagcgctacgcggaggaggagatgtaccgtccacacccggccttctaccgcccgcgtctcagcgactgctccgactactcgggccagttcctgcagcccgaggcgtggcgccgcggccggagcccctccgacatctccagcgacgtgtccatccaaatgacgcagaactaccctcccgccatcaagtacccggaccacctgcacatctccacctcgccctgctgaggcccgcccctcggagctccccctgcctcctcctcctcctcgtcttaggggggtctccctgcaatgcagcgcccccttccgtcctcgggactcctcgctcccacccggaggaggctgcgccagctttaggccccgccctcctcccaatggctccgcccacagactcccttatttcaatggccgcgccctcttttcccgacctctccttttcattggtccctctcactcccaaatgactcctccccttcgttggcccgcccctttcctctggcccctcctctccaagaaaattagctcctccctcgttctccacctgctctgagctgggagcagccagaggcggtgcaagcgcccagctccccagagctccccaacctcggacctcaccgcaggggcgctgggctggagagcaggttcgggcagccgtcgggaataccgaccatcctcttctcccttctaacctgggcttcctttttccctgcctaatctcacctcctgacctgctgggtcctccggtgcagtgggagggccggcttgctccacccgcagccccggggtggcgtagggaagggggctggaagccacgggtacggttaacctggcccttccctccccatctcccctacttccctggaaggtcccattctttctcaccggctgggctcttttctgcttcctgaaggttacctgccttttagggggctcttgtctaaaggatcttcttgctttctcagctatccttggcttctttttcgtcttcctcctcctttaactctttctctcctttcctcccttcacccgttcgtcccaagcccttgggtgcatcccgccctaggcgcacaccagacggccagaatggggaccctagggtggagggaattcccccacgccatctccgcacctgtgcccgcctctcccccctcgaggccccgtcgagggagggaggggcagtagcgggggtcgacaccccccccaaacctctaagtcttccattttctggctctcctcctcattgacgtccctcttcccccctcagaaccccaactctggcctctttcaagggcccgtccgccccgttggacagattttggggggagaggaggtcaccaggaactcgcccacccccccttattagggaaagaggggcgaggtagcacagtgctgtacacggaaccagaatggcccccggggtggggggaggggggcaggggagggacgggggcttttagtttgcatcttaggtgggaggggggaggggggacccgccgcagttaacctgactttacgcagcgatttttaacgaggctggggggaggggggcactggggtggggacagggtggggtggggggcctggctctgttatttaccgtgtatcatatgtaaatatcgacagaaacttcaataaactttatttcaaacacgtctccgcctgcccggagggaagggattggatagagggggcttagtctgggtctctgcttctagggttgcaggcctaaagtactgcagaatgacgttagatgggtcgttgttaaatgacttaatcatcatcattatcaacggcagcgctttatacttcagtccgtgtaaagcatgcaggaccgtaaatgatactggtcaggatcaataaacgctttctcctggta

SEQ ID NO: 7213 - DNA, 717 bp, Homo sapiens
agggaccttctggatattttacgggaaagaggtaagctgtctgtcggggacttggctgaactgctctacagagtgaggcgatttgacctgctcaaacgtatcttgaagatggacagaaaagctgtggagacccacctgctcaggaaccctcaccttgtttcggactatagagtgctgatggcagagattggtgaggatttggataaatctgatgtgtcctcattaattttcctcatgaaggattacatgggccgaggcaagataagcaaggagaagagtttcttggaccttgtggttgagttggagaaactaaatctggttgccccagatcaactggatttattagaaaaatgcctaaagaacatccacagaatagacctgaagacaaaaatccagaagtacaagcagtctgttcaaggagcagggacaagttacaggaatgttctccaagcagcaatccaaaagagtctcaaggatccttcaaataacttcagggtgagtctggagaaaacatatggaatcccagcatgaaaccgtttcagagttctaataaaaatatgcatattctcacagcatgtactttatttaatatctgaaaaaattgtgatagaaatgtgtatttgttttaaaaacgtgtaacttcttatatttcaaagctaatacatgttcattgagatatttggagactatagagaaagataaaagaaaataaatcac

SEQ ID NO: 7214 - DNA, 750 bp, Homo sapiens
cttggagaggcggaggtggaaacgatgcgcaggagttggcttggggctttttgtttgcgtgtccctgtttacctattcataatcatggatcccctctgctttgtgatactgtgaaccacgcataacagcaattctttacaccaccgggttgagaagaaggcgcctgaggctgactttctggacctgccgtcacgcagtaaagatgtggttggccatcgaagacggcaatttggaggaaatggaagaggaagtacggcttaagaagcgaaaaagacgaagaaatgtggataaagatcctgcaaaagaagatgtggaaaaagctaagaagagaagaggccgccctcccgctgagaaactgtcaccaaatccccccaaactgacaaagcagatgaacgctatcatcgatactgtgataaactacaaagataggtgtaacgtggagaaggtgcccagtaattctcagttggaaatagaaggaaacagttcagggcgacagctcagtgaagtcttcattcagttaccttcaaggaaagaattaccagaatactatgaattaattaggaagccagtggatttcaaaaaaataaaggaaaggattcgtaatcataagtaccggagcctaggcgacctggagaaggatgtcatgcttctctgtcacaacgctcagacgttcaacctggagggatcccagatctatgaagactccatcgtcttacagtcagtgtttaagagtgcccggcagaaaattgc

SEQ ID NO: 7215 - DNA, 3894 bp, Homo sapiens
atggcgagcgactccccggctcgaagcctggatgaaatagatctctcggctctgagggaccccgcagggatctttgaattggtggaacttgttggaaatggaacatacgggcaagtttataagggtcgtcatgtcaaaacgggccagcttgcagccatcaaggttatggatgtcacaggggatgaagaggaagaaatcaaacaagaaattaacatgttgaagaaatattctcatcaccggaatattgctacatactatggtgcttttatcaaaaagaacccaccaggcatggatgaccaactttggttggtgatggagttttgtggtgctggctctgtcaccgacctgatcaagaacacaaaaggtaacacgttgaaagaggagtggattgcatacatctgcagggaaatcttacgggggctgagtcacctgcaccagcataaagtgattcatcgagatattaaagggcaaaatgtcttgctgactgaaaatgcagaagttaaactagtggactttggagtcagtgctcagcttgatcgaacagtgggcaggaggaatactttcattggaactccctactggatggcaccagaagttattgcctgtgatgaaaacccagatgccacatatgatttcaagagtgacttgtggtctttgggtatcaccgccattgaaatggcagaaggtgctccccctctctgtgacatgcaccccatgagagctctcttcctcatcccccggaacccagcgcctcggctgaagtctaagaagtggtcaaaaaaattccagtcatttattgagagctgcttggtaaagaatcacagccagcgaccagcaacagaacaattgatgaagcatccatttatacgagaccaacctaatgagcgacaggtccgcattcaactcaaggaccatattgatagaacaaagaagaagcgaggagaaaaagatgagacagagtatgagtacagtggaagtgaggaagaagaggaggagaatgactcaggagagcccagctccatcctgaatctgccaggggagtcgacgctgcggagggactttctgaggctgcagctggccaacaaggagcgttctgaggccctacggaggcagcagctggagcagcagcagcgggagaatgaggagcacaagcggcagctgctggccgagcgtcagaagcgcatcgaggagcagaaagagcagaggcggcggctggaggagcaacaaaggcgagagaaggagctgcggaagcagcaggagagggagcagcgccggcactatgaggagcagatgcgccgggaggaggagaggaggcgtgcggagcatgaacaggaatacatcaggcgacagttagaggaggagcagagacagttagagatcttgcagcagcagctactgcatgaacaagctctacttctggaatataagcgcaaacaattggaagaacagagacaagcagaaagactgcagaggcagctaaagcaagaaagagactacttagtttcccttcagcatcagcggcaggagcagaggcctgtggagaagaagccactgtaccattacaaagaaggaatgagtcctagtgagaagccagcatgggccaaggagatcccacatctggtagctgtaaaatcccagggacctgccttgaccgcctcccagtcagtgcacgagcagcccacaaagggcctctctgggtttcaggaggctctgaacgtgacctcccaccgcgtggagatgccacgccagaactcagatcccacctcggaaaatcctcctctccccactcgcattgaaaagtttgaccgaagctcttggttacgacaggaagaagacattccaccaaaggtgcctcaaagaacaacttctatatccccagcattagccagaaagaattctcctgggaatggtagtgctctgggacccagactaggatctcaacccatcagagcaagcaaccctgatctccggagaactgagcccatcttggagagccccttgcagaggaccagcagtggcagttcctccagctccagcacccctagctcccagcccagctcccaaggaggctcccagcctggatcacaagcaggatccagtgaacgcaccagagttcgagccaacagtaagtcagaaggatcacctgtgctcccccatgagcctgcgaaggtgaaaccagaagaatccagggacattacccggcccagtcgaccagctgatctgacggcattagccaaagaactaagagaactccggattgaagaaacaaaccgcccaatgaagaaggtgactgattactcctcctccagtgaggagtcagaaagtagcgaggaagaggaggaagatggagagagcgagacccatgatgggacagtggctgtcagcgacatacccagactgataccaacaggagctccaggcagcaacgagcagtacaatgtgggaatggtggggacgcatgggctggagacctctcatgcggacagtttcagcggcagtatttcaagagaaggaaccttgatgattagagagacgtctggagagaagaagcgatctggccacagtgacagcaatggctttgctggccacatcaacctccctgacctggtgcagcagagccattctccagctggaaccccgactgagggactggggcgcgtctcaacccattcccaggagatggactctgggactgaatatggcatggggagcagcaccaaagcctccttcaccccctttgtggaccccagagtataccagacgtctcccactgatgaagatgaagaggatgaggaatcatcagccgcagctctgtttactagcgaacttcttaggcaagaacaggccaaactcaatgaagcaagaaagatttcggtggtaaatgtaaacccaaccaacattcggcctcatagcgacacaccagaaatcagaaaatacaagaaacgattcaactcagaaatactttgtgcagctctgtggggtgtaaaccttctggtggggactgaaaatggcctgatgcttttggaccgaagtgggcaaggcaaagtctataatctgatcaaccggaggcgatttcagcagatggatgtgctagagggactgaatgtccttgtgacaatttcaggaaagaagaataagctacgagtttactatctttcatggttaagaaacagaatactacataatgacccagaagtagaaaagaaacaaggctggatcactgttggggacttggaaggctgtatacattataaagttgttaaatatgaaaggatcaaatttttggtgattgccttaaagaatgctgtggaaatatatgcttgggctcctaaaccgtatcataaattcatggcatttaagtcttttgcagatctccagcacaagcctctgctagttgatctcacggtagaagaaggtcaaagattaaaggttatttttggttcacacactggtttccatgtaattgatgttgattcaggaaactcttatgatatctacataccatctcatattcagggcaatatcactcctcatgctattgtcatcttgcctaaaacagatggaatggaaatgcttgtttgctatgaggatgagggggtgtatgtaaacacctatggccggataactaaggatgtggtgctccaatggggagaaatgcccacgtctgtggcctacattcattccaatcagataatgggctggggcgagaaagctattgagatccggtcagtggaaacaggacatttggatggagtatttatgcataagcgagctcaaaggttaaagtttctatgtgaaagaaatgataaggtattttttgcatccgtgcgatctggaggaagtagccaagtgtttttcatgaccctcaacagaaattccatgatgaactggtaa

SEQ ID NO: 7216 - DNA, 1980 bp, Homo sapiens; identical to SEQ ID NO: 6515

SEQ ID NO: 7217 - DNA, 967 bp, Homo sapiens
ggcggggaccgggaggcagagacggggcggccgtggctccgagggcgggagctgagccgggccccgggaccgaagtttggcggcggctccgggaggcagagcgggctccccgggcgacttccaggcccctctcgcgtcctcgccccggacccgtgggcagccggggggaacggaagccgcggccgggccaactccgaggcggggacgccgcgacgggaacttgagatgaaacagcagagctgaaaagagagatcaccaaggaaagtgcctgaaagggattattcccacgcctccaaaggatcctggcaggctgtgcctgaggagatgggttccaattttagggagcaggctgcctaatgaaggagccaggcttgcacacagacaattctagaactggtggcccgagagggatgtgaaggcccaaaatgaccctcttaccgggagacaattctgactacgactacagcgcgctgagctgcacctcggacgcctccttccacccggccttcctcccgcagcgccaggccatcaagggcgcgttctaccgccgggcgcagcggctgcggccgcaggatgagccccgccagggctgtcagcccgaggaccgccgccgtcggatcatcatcaacgtaggcggcatcaagtactcgctgccctggaccacgctggacgagttcccgctgacgcgcctgggccagctcaaggcctgcaccaacttcgacgacatcctcaacgtgtgcgatgactacgacgtcacctgcaacgagttcttcttcgaccgcaacccgggggccttcggcactatcctgaccttcctgcgcgcgggcaagctgcggctgctgcgcgagatgtgcgcgctgtccttccaggaggagctgctgtactggggcatcgcggaggaccacctggacggctgctgcaagcgccgctacctgcagaagattgaggagttcgcggagatggtgga

SEQ ID NO: 7218 - DNA, 726 bp, Homo sapiens
tttcttcaatgctttgagtgatgcaaccatgaaaatcgttcagatcatcatgtgttatatgccactaggtattttgttcctgattgctgggaagatcatagaagttgaagactgggaaatattccgcaagctgggcctttacatggccacagtcctgactgggcttgcaatccactccattgtaattctcccgctgatatatttcatagtcgtacgaaagaaccctttccgatttgccatgggaatggcccaggctctcctgacagctctcatgatctcttccagttcagcaacactgcctgtcaccttccgctgtgctgaagaaaataaccaggtggacaagaggatcactcgattcgtgttacccgttggtgcaacaatcaacatggatgggactgcgctctatgaagcagtggcagcggtgtttattgcacagttgaatgacctggacttgggcattgggcagatcatcaccatcagggaccggttcaggaccatggtcaacgtccttggtgatgcttttgggacgggcattgtggaaaagctctccaagaaggagctggagcagatggatgtttcatctgaagtcaacattgtgaatccctttgccttggaatccacaatccttgacaacgaagactcagacaccaagaagtcttatgtcaatggaggctttgcagtagacaagtctgacaccatctcattcacccagacctcacagttcta

SEQ ID NO: 7219 - DNA, 1163 bp, Homo sapiens; identical to SEQ ID NO: 6354

SEQ ID NO: 7220 - DNA, 4661 bp, Homo sapiens
ttgtactgtatatttacacattcacacacaatcaccctttctaacttctgggactctttgcgcaactgctaggatttctcaagtgcatgtggcaacacagcccagctccgggtggaaaccagcagggctctggaggggctcggagaccaggggagctgtcaaggctgcggcggggaccagagaggagcctggcgggggtggctgggtggctgggggaatccccccaacttcccatcgcaggcgcagctctctcggccgcctatttcctccgaaacccgcgctgcggagcagcccagtgcatagagttcaacacttccccttgttgtggaaagtaaaggagcctcactaccacctttttttctttgcgttttcttactgctggtcctgggagccttttccttcggagcagcagccctgtccggcatctgtcttgagctcccagcaaggaaagtccatcagcttgataatggaggagaacaatgactccacggagaacccccaacaaggccaagggcggcagaatgccatcaagtgtgggtggctgaggaagcaaggaggctttgtcaagacttggcatactcgctggtttgtgctcaagggggatcagctctattatttcaaagatgaagatgaaaccaagcccttgggtactatttttctgcctggaaataaagtttctgagcatccctgcaatgaagagaacccagggaagttcctttttgaagtagttccaggaggcgatcgagatcggatgacagcaaatcatgaaagctacctcctcatggcaagcacccagaatgatatggaagactgggtgaagtcaatccgccgagtcatatggggacctttcggaggaggcatttttggacagaaactggaggatactgttcgttatgagaagagatatgggaaccgtctggctccgatgttggtggagcagtgcgtggactttatccgacaaagggggctgaaagaagagggtctctttcgactgccaggccaggctaatcttgttaaggagctccaagatgcctttgactgtggggagaagccatcatttgacagcaacacagatgtacacacggtggcatcacttcttaagctgtacctccgagaacttccagaaccagttattccttatgcgaagtatgaagattttttgtcatgtgccaaactgctcagcaaggaagaggaagcaggtgttaaggaattagcaaagcaggtgaagagtttgccagtggtaaattacaacctcctcaagtatatttgcagattcttggatgaagtacagtcctactcgggagttaacaaaatgagtgtgcagaacttggcaacggtctttggtcctaatatcctgcgccccaaagtggaagatcctttgactatcatggagggcactgtggtggtccagcagttgatgtcagtgatgattagcaaacatgattgcctctttcccaaagatgcagaactacaaagcaagccccaagatggagtgagcaacaacaatgaaattcagaagaaagccaccatggggcagttacagaacaaggagaacaataacaccaaggacagccctagtaggcagtgctcctgggacaagtctgagtcaccccagagaagcagcatgaacaatggatcccccacagctctatcaggcagcaaaaccaacagcccaaagaacagtgttcacaagctagatgtgtctagaagcccccctctcatggtcaaaaagaacccagcctttaataagggtagtgggatagttaccaatgggtccttcagcagcagtaatgcagaaggtcttgagaaaacccaaaccacccccaatgggagcctacaggccagaaggagctcttcactgaaggtatctggtaccaaaatgggcacgcacagtgtacagaatggaacggtgcgcatgggcattttgaacagcgacacactcgggaaccccacaaatgttcgaaacatgagctggctgccaaatggctatgtgaccctgagggataacaagcagaaagaacaagctggagagttaggccagcacaacagactgtccacctatgataatgtccatcaacagttctccatgatgaaccttgatgacaagcagagcattgacagtgctacctggtccacttcctcctgtgaaatctccctccctgagaactccaactcctgtcgctcttctaccaccacctgcccagagcaagacttttttggggggaactttgaggaccctgttttggatgggcccccgcaggacgacctttcccaccccagggactatgaaagcaaaagtgaccacaggagtgtgggaggtcgaagtagtcgtgccaccagtagcagtgacaacagtgagacatttgtgggcaacagcagcagcaaccacagtgcactgcacagtttagtttccagcctgaaacaggaaatgaccaaacagaagatagagtatgagtccaggataaagagcttagaacagcgaaacttgactttggaaacagaaatgatgagcctccatgatgaactggatcaggagaggaaaaagttcacaatgatagaaataaaaatgcgaaatgccgagcgagcaaaagaagatgccgagaaaagaaatgacatgctacagaaagaaatggagcagtttttttccacgtttggagaactgacagtggaacccaggagaaccgagagaggaaacacaatatggattcagtgagcctgctttcgcctgctgtctctgatggctctggcaaggactccagggattctggtgggatatgacttagaaccaggtggctggtcacctggatgtacagaagtctaactggtgaaggaatatcatttacagacattaaacatccatatctgcaatgtgtaccaaagttatatcatgccccataatgctactgtcaagtgttacaactggatatgtgtatatagagtagtttttcaaaagtaaactaaaaatgagaagcatatttcaagaattattttattgcaagtcttgtatttaaatgttaaatcaatatgttgttgcaatttagcttgctttcaagcttcaccccttgcacttaacataagctatttttggcattgtgttatcatcggcttattttatagatcaatatttttatttcccttttttgctgaggaaatgaagataagcaaaaatataaatatatatataaatatatgagttattaaaatcagaagaatactttgtggctgtgctgtttgtgccaatagactttgtcatgaccaaaaagagaaatgtaaatagttttataaaatacagtcgaatcaccaggaacctttgagctgcttttaaaattcttcccctggcaccactcagttttgcttttgcgaggcgatttgacataggaactttgagactccatgagaaagtccctttctgaggcccactgtctaccttgccagatcctcagtgcgtatcgccaatgcaggatgctccttagaaaagaaaaaatggtaaagaatggcatttaacgattcaggctttgaattactctgtccctctggaccgaatctctttaactgctggatagttttagaggaattctcctgctacttaggtactgggaaacaatgcttgctaaaccatgcccacgtgagcacctgtctcccactcaaacctctcccatctcccaacaactgcactttagaataccagcagtgaaatggtattactgtttccctctgagtgaaactgctagagtatatgtcacgtagtgacatttttttctcactcaggctattgccatctgggattctctccctactacagctggcaaagttggtttgcagcaagaagatagtgggagggggccaggctgcaggagaaggagaaaagtttagaagaaacaaaccattttgcttctaattttgacagtatcactttcctgttaaaacatacaataattttaaaaggtgaatgcctaaagttccaattttagcaaatatgggaacctcagcaatgctaattttctagaaaaacccagggctctttggagctagagttttgggagaacagttcttcacaataaggcaatggttttgagaggccaggcaaataatctttctcaccgtagaacaaaaagttacaaaaggcataatcggaaatagagactacatacttgagtttatggggtttgtgttgtttgaaggttcaatgcttgcatgtgtttatttattttcaagagggaaagtggtctgtactgctttcatccttgccactgtcttgcttttattttttactctcccactgagcaagcgtctgtggtcctatggtatcaaccagtatctttatagcaataatttctttaattcccttttctctctctttccaattatttaaccagttacttccacctggacatacgataggaaattcaaactcaaaatatgaaaattgatcttaataactctcccttcatatcttttcacctatttccagtccttatcatagttgataaaaacctcagactcatccagaaagctatatgatgcactagtaaaaaaaacaaagatattcaaactgcttgggttcaaatggtatacaatttgccagctgttactgaaccttctatgcataactttttttttcctctgtgcaattggaataataaaaatactactcccataga

SEQ ID NO: 7221 - DNA, 548 bp, Homo sapiens
agttaaatatgagagttaaatacttctagttttgaaaatgtgagatcgaaaaggcaagaaaccaggctttcctactgtctcacataatttcttacacaaaatcattttacagagagaaactgagactctgaaaaggttaatatccaacacaggtattaagcaccttccagatgttcacaagattcattctctccaaaaagttttacttgacattcaagataacataaacatccacacaattgaaagaaattctttcgtggggctgagctttgaaagtgtgattctatggctgaataagaatgggattcaagaaatacacaactgtgcattcaatggaacccaactagatgagctgaatctaagcgataataataatttagaagaattgcctaatgatgttttccacggagcctctggaccagtcattctagatatttcaagaacaaggatccattccctgcctagctatggcttagaaaatcttaagaagctgagggccaggtcgacttacaacttaaaaaagctgcctactctggaaaagcttgtcg

SEQ ID NO: 7222 - DNA, 2896 bp, Homo sapiens
acatgctgcccaggctgcgcgggtgattggcttggctggacctgaatgatgcggctgtgattgctgaattgtctgggcaggtttggagtctctggcaagctcccctgactgtgcatccctctggagacgaagaggagggggaggcctgtcctctctgggatccattggtcacatccccctgaggattcccgaatgcctacctccagtgtcgtcaacatggagttctgaagtccatgtggctcttcacagtgaatcaggtgttaaggaagatgcagagacgccacagcagcaacacggataacattccacctgaaagaaaccgcagccaggcgctcagctccgaggcgagtgtggatgaaggtggcgtctttgagagtctgaaggcagaggcagcctccccaccagcgctcttctcgggcttatcaggcagcctccccaccagctcgttcccctccagcctggtgctgggctcctcggctggcggcggggacgtgttcatccagatgcccgcgtccagggaggaaggagggggccggggcgaggggggcgcctaccaccaccgccagccccaccaccatttccaccatggcggccaccgcgggggctccctgctgcagcacgtgggtggggaccaccgggggcactcggaggagggaggcgacgagcagcctgggacgcccgcccccgccctgtccgagctgaaggctgtgatctgctggctccagaaaggactccccttcatcctgatcctcctggccaaactgtgctttcagcataagctcggcattgctgtgtgcatcgggatggccagcaccttcgcctatgccaactccacgcttcgagaacaggtctcactgaaggagaagaggtcagtgctggtcatcttgtggatcctggcctttctggcggggaacaccctctatgtgctttatacattcagctcccagcagctgtacaacagcctcatattcctgaagcccaacctggagatgctggacttctttgacctgctatggattgtggggatcgcagactttgttctgaagtacatcaccatcgccctcaagtgcctcatcgtggccctgcccaagatcatcctggctgtcaagtccaagggaaagttctatctggtcatcgaggagctgagccagctgttccgatcccttgtccccatccagctgtggtacaaatacatcatgggtgacgactcctccaacagctacttcctgggcggggtcctgatcgttctctacagcctctgcaagtccttcgacatctgtggacgtgtgggcggagttaggaaagccctgaagcttctctgtacctctcagaactatggagtccgagccaccgggcagcagtgcacagaagctggtgacatctgcgccatctgtcaggccgagttccgagagcctctgattctcctgtgccagcacgtgttctgtgaggagtgcctctgcctgtggctggaccgtgagcgcacctgcccgctctgccgctcggtcgccgtggacaccctgcgctgctggaaggacggcgccacgtccgcacacttccaggtgtactaggaccgaacactgaggacacccagaaggacgccaaggattcaggacatttgcccctgtgtgccaccaaaccaggactttccccttggcttggcatccctggctctctcctggtacccagcaagacgtctgttccagggcagtgtagcatctttcaagctccgttactatggcgatggccatgatgttacaatcccacttgcctgaataatcaagtgggaaggggaagcagagggaaatggggccatgtgaatgcagctgctctgttctccctaccctgaggaaaaaccaaagggaagcaacaggaacttctgcaactggtttttatcggaaagatcatcctgcctgcagatgctgttgaaggggcacaagaaattggagctggagaagattgatgaaagtgcaggtgtgtaaggaaatagaacagtctgctgggagtcagacctggaattctgattccaaactctttattactttgggaagtcactcagcctccctgtagccatctccagggtgacggaacccagtgtattacctgctggaaccaaggaaactaacaatgtaggttactagtgaataccccaatggtttctccaattatgcccatgccaccaaaacaataaaacaaaattctctaacactgcaaagagtgagccatgcctgttaacactgtaaagaatgtaacatgtgggggacacacaggggcagatgggatggtttagtttaggattttattagtgcatgccctaccctctgggggaacgtcccatctgaggttttcttctcggtggggggatttaacttctgtcctagggaaaacagtgtctgatgaggagtgtttccaacacaggctacatgaattcccctataccagtgcgaaagcagccaggagtccccgttggaaaagaacaatgccactctcttttatgtatcttggttctgcaactcatttgttgtaagtagggttaatcgagtatcaggttcacagtatcctgcccttattattttatgattcactgactcaagttccacgaagtccttagaaatggacctcttcatgtaaaatatcttgagaataataaatgtgagggaataagaaaggcaagctttggacacagatatgataggtgcatcagcttcggaagagaagaatgatgtgcagagtgttaggaagacatccgggctgctgagactcgggattagaagaaagagaggtaaataaagtgggtcctggaatcttttaggacttctgctgtaggacaaacagctgcctttggtgttttaatgtctcccaaagtacccttcagccaataaataccatctgttggtgc

SEQ ID NO: 7223 - DNA, 699 bp, Homo sapiens
cgccattttcgagtgatgcctgatctcatcaatctagcgggagagacaggataacctgtccgagagtatagcgccactatgactccgccggaaaaattactttaaaaatcgccaaaaattacttggagcaaagggcagtcggcggagcttcgccaaggctggcgcagtcgggtttaataatgatagaatgaagaccacaataaaagagacctctacttagctcagcaattcttacctttcttacctatttgatgaagatgtcttttgaaaggtgtactgcaaggaacaaaatgtttgtaaattctccttttaccaaggtggataattactgtaccttcctcatggaaaaagttttatttaaagtgttatttctcattgaatactatcaaaaaggaaaaaaaaatgacctaaacttttgagatagatttggctctagtaagtatttagttatatcacttgcatatctgggagaagaaataagagactatcatcagtacattcccatctactaaaaaaatttattttacacatgtcaagggattacttataacttccattttattactaatagcttgaacccttttaatgaagacctaactcctccaccagaaatttaagtttatgttcttactttgtttacttataaaatacatctcaggtatttcggatgtcttttttttttctaagcctatatgaaat

SEQ ID NO: 7224 - DNA, 587 bp, Homo sapiens
taaagatggcaggtttggcgctctaggtggcagagaaaccaccaggaaggcttggtgaatggggagaaaggtatggtgatccggtccaccgtgtggttaggattcccaaattttgttgacagcgtctcggatatgaaccacacggaaatttggcctgctgctttctgcgtggggagtgcgatgtggatccagctgttgtacagtgcctgcttctggtggctgttttgctatgcagtggatgcttatctggtgatccggagatcggcaggactgagcaccatcctgctgtatcacatcatggcgtggggcctggccaccctgctctgtgtggagggagccgccatgctctactacccttccgtgtccaggtgtgagcggggcctggaccacgccatcccccactatgtcaccatgtacctgcccctgctgctggttctcgtggcgaaccccatcctgttccaaaagacagtgactgcagtggcctctttacttaaaggaagacaaggcatttacacggagaacgagaggaggatgggagccgtgatcaagatccgatttttcaaaatcatgctggttttaattatttg

SEQ ID NO: 7225 - DNA, 678 bp, Homo sapiens
acgccctgcccaacagaagccgcagtcccgtggggtctggagacgcagtttcctgttaatgacaataaatccctgctccccctgcctcagacatctacgcagcgaaatcgagcctggccttgagggtccacaccgcgagggaagatgcgtgcgcccattacactgggccatctatgttggcgatggatatgtggttcatctggcccctccaagtgaggtcgcaggagctggtgcagccagtgtcatgtccgccctgactgacaaggccatcgtgaagaaggaattgctgtatgatgtggccgggagtgacaagtaccaggtcaacaacaaacatgatgacaagtactcgccgctgccctgcagcaaaatcatccagcgggcggaggagctggtggggcaggaggtgctctacaagctgaccagtgagaactgcgagcactttgtgaatgagctgcgctatggagtcgcccgcagtgaccaggtcagagatgtcatcatcgctgcaagcgttgcaggaatgggcttggcagccatgagccttattggagtcatgttctcaagaaacaagcgacaaaagcaataactgaaaaagactgtcctgtcagcgatgactttatacatcaagggggtcttgttttgctagagagtttggggtttggtttgtggatttcattgtga

SEQ ID NO: 7226 - DNA, 5972 bp, Homo sapiens
acagaccataggtgaactgttaaggagggagaagccgcagtgtcaccttccacagtcctgctcccattaagacctatgaagtggaaaatgcagattattctttgaggtttcctgggaccagaaaaggtcagagactcttaatgggtaatgcagacaactggaatgcaatcatcaggtattcatttctgttttaaggttttatgtctgagaaacctgaaacctgaagaagtaaagcaatcatgattttttaaaaacttaataatatggttttggatttaaaaagaaagactgactcagagctggggaaaacactcacttgtgatacggatcaatgtgaaaacagcttaactctgttccatggcaattcgcacagtgtgactcagagacacctctcttcaccagctctggctcaggggatgtgaagccagaagcagaggtcacagtgacttcatctgagaaggacttaactgaccattgctggttttgaagccggaggaaggcccacagtcaatgaatgagagaggcttcgagaagctagaaatggcaaggaaatagattttcctctaaagctcccagaaagaaacacggttctgctgacacctcgattttaggccagtgagacctgcttcagacttctgacctacagaacgatttctttaaagactcgtgcagcacatcattatcgctggatgcccggacatgtaatacacctgacagcatgtgaagtgctcagaatggggcaggatgtcacctggaatcagcactaagtgattcagactttccttacttttaaatgtgctgctcttcatttcaagatgccgttgcagctctgataaatgcaaactgacaaccttcaaggccacgacggagggaaaatcattggtgcttggagcatagaagactgcccttcacaaaggaaatccctgattattgtttgaaatgctgaggacgttgctgcgaaggagacttttttcttatcccaccaaatactactttatggttcttgttttatccctaatcaccttctccgttttaaggattcatcaaaagcctgaatttgtaagtgtcagacacttggagcttgctggggagaatcctagtagtgatattaattgcaccaaagttttacagggtgatgtaaatgaaatccaaaaggtaaagcttgagatcctaacagtgaaatttaaaaagcgccctcggtggacacctgacgactatataaacatgaccagtgactgttcttctttcatcaagagacgcaaatatattgtagaaccccttagtaaagaagaggcggagtttccaatagcatattctatagtggttcatcacaagattgaaatgcttgacaggctgctgagggccatctatatgcctcagaatttctattgcattcatgtggacacaaaatccgaggattcctatttagctgcagtgatgggcatcgcttcctgttttagtaatgtctttgtggccagccgattggagagtgtggtttatgcatcgtggagccgggttcaggctgacctcaactgcatgaaggatctctatgcaatgagtgcaaactggaagtacttgataaatctttgtggtatggattttcccattaaaaccaacctagaaattgtcaggaagctcaagttgttaatgggagaaaacaacctggaaacggagaggatgccatcccataaagaagaaaggtggaagaagcggtatgaggtcgttaatggaaagctgacaaacacagggactgtcaaaatgcttcctccactcgaaacacctctcttttctggcagtgcctacttcgtggtcagtagggagtatgtggggtatgtactacagaatgaaaaaatccaaaagttgatggagtgggcacaagacacatacagccctgatgagtatctctgggccaccatccaaaggattcctgaagtcccgggctcactccctgccagccataagtatgatctgtctgacatgcaagcagttgccaggtttgtcaagtggcagtactttgagggtgatgtttccaagggtgctccctacccgccctgcgatggagtccatgtgcgctcagtgtgcattttcggagctggtgacttgaactggatgctgcgcaaacaccacttgtttgccaataagtttgacgtggatgttgacctctttgccatccagtgtttggatgagcatttgagacacaaagctttggagacattaaaacactgaccattacgggcaattttatgaacaagaagaaggatacacaaaacgtacccttatctgtttccccttccttgtcagcatcgggaagatggtatgaagtcctctttggggcagggactctagtagatcttcttgtcagagaagctgcatggtttctgcagagcacagttagctagaaaggtgatagcattaaatgttcatctagagttaatagtgggaggagtaaaggtagccttgaggccagagcaggtagcaaggcattgtggaaagaggggaccagggtggctggggaagaggccgatgcataaagtcagcctgttcaaagtgctcagggacttagcaaaatgagaagatgtgacctgtgccaaaactattttgagaattttaaatgtgaccatttttctggtatgaataaacttacagcaacaaataatcaaagatacaattaatctgatattatatttgttgaaatagaaatttgattgtactataaatgatttttgtaaataatttatattctgctctaatactgtactgtgtagtgtgtctccgtatgtcatctcagggagcttaaaatgggcttgatttaacattgtttttgtgttatttttgcttgaaacaacgcacacattttcaacaaccaaaaaatgacaatttctagtttagttaatttctacaaatcatcttatgttattagcaaggttaagacatcttttttaaaaaaattatagcttctaccaagagaaacactcaatttttctagagatttgcctctatcttcctttcctcagtcttcccagactgctatcaagctgtgtaaaaatttactttcactggaccctaaattattgtctctgctatctgactgccagtaattagtgcagaaaactaagacaggatgatacaggtttgaggggctggggagtgggaggggggagaaaaggaatgtatttaaacaatttccgatgcccatgatgagtttaaaaaccagcattgacaccatccccaaaattaaggctgtcgcttattgaatccacttgtgtccaacctcccaggattgttttatcctaatgtcacctgtatattcatttgaaaggacttggccctgttcttgggtcttcccgttacctgccccctgggtggtaagtttcctcctttctcaaccttccacgaggaggaaagaagtgtgcagtcattccacatggcctgttggaaggcctggggagggaactttgggtttgggacagatttttttttttgtttttggtatcattcacagcatacgatttttactctctccatcttcaccataagacagataatttggggttgctataatgctgtcacacatctcaaagtacattcaaatcttaaaaagaaattctcgtacttttgccatgttgatactgttcagcaaacaagctaccaggaactgtgaggctttgtcatttagcattagactttaaacaagaattaaaatcatgtgctgtatttttaaaatctagccaaattaaatagtacatgagaaattcagagtattagacagttttaaggcattcaactgagaaaactttatttgtcaaagtcagaaaacattttcatcttattgagagatatgtttttaaacttttatcatcatttgtaaatgtggaagttggtggattgctgtgtttttgcatgattagcatgggagtctgttggagcaagaggaacatgcttgttttgaaaactcgagatgatgagggtggtacatgcagtgtgttctctctttattggcttctaaaccagttttgtcctttaatgcatgtcaaatatttctcccatgcttctcttagcagaaaagtttttacctataagacagggcaccttttaactctaaaactagtgatactcagtgacatagactttgtcttataaacattttttcattttttattttgaaaaattgcaaatctacagcaaaagtaaaacagtagagtgaacaccatgtaaccctcacctggtgttaacattgtaccctatttgctttaagttgtatgtatttctgaacttggcaaaattggaaattaaaatttttaaaaattacaaatatacaaagttatttatcttagcacatttattatgtgtgactgcatctgatttatatttaaattggcaggttttgagggatttttttcttcatcataaatgtaaacataggattttagagtctatttccccaagcgccacattataactgtaaacttaccatcttctatgtagctgtgatatctcatctttctaaaatggaacttgttaaaaagtgttcaaacactatccctaatgcctgcggcagaatttatatacgatccattcattggggctcaaagtatcttttagacttttaaggacaatttacagcaaatgaaatttatgatgctgtgacaagaaatttaaagaatcaaaacgatggtttgaaaaggaaacctatgatacatgcaggagaagcaaaacccaagtgattggtgagaaatatagaaattatttaaattactttatagtaattattaaacactaatttttgtactgtcattgaaggtgttttatagagaaatctgagaaatcacattcacaaattagaagtcaaacatggccaggcacagtggctcacacctgtaatcttcaggatttcaagaccagcctagccaacatgacgaaaccccatctctactgaaaatagaaaaaaaaaattagccaggcttgcacctgtaatcccagttacctgggaggctgaggcaggagaatctcttgagcccaggaggcggaggttgcagtgagctgagatgccaccaccacaccagcctgggtgacagagtgaaactcgtatctccaaacaaacaaacaaaaagtccttaaacatatgtgaacaaaaattttgtgatggaaggattctagttaatgagtattgcatcaagatttacatctttcttactaaggaaaagagttaataaaaattgttctttattttacaggcagttactgaggctcttcccagatctcagtaaacagccactcagccttgaaaatggagtgttgttgtttctaaacatatatttatgtcatttattaagtacagttcacttaaataacataagtagattttctcttgtagtgatttgggtaggaagaggccatgtttcagttcgttttctctgtagggtcgattgaattggaccttttcagttgttcagaaaaataaaaataatttctcatattaaatacagacgctcctcaacttatgatgtgggtaggtcccagtaaacccattataatttgaaaatatcacattgaaaatgcatttaatatctcttacctgaaatcataacttagccaagcctaccttaaatgttctcagaacatttagcctgcagttgggcaaaaccatttaacacaaagcctattttataatgaagtgttgaatagctcatgttatttactgaatactgttgtgaaagtgaaaaacaatgattgtatgggtactcaaagtataatttctactgaatgcatatcacttgtgcactgttgtaaagctgaaaaaccgttaagcctctacgatttttaagtaagttggggaccatcagtttaaaataaatgcaatactatttcatgataaacatggtcactgtaagttttactcttttgaatgagggtgcgacagaatgcagttagaatcagttcatatcaccattaaaatcatccattcagaaacc

SEQ ID NO: 7227 - DNA, 2209 bp, Homo sapiens
aaaaaaaaaaaaaaaaaaaaaagcaatcattaagcttttcatctagccattacttttgtacaggctctcattaattccacatagatggtctaatggtctactaaatagtattctaatcctccatcttgtctatctcttagccattctccatgataaaggatgaatggtctttcggaaacataaatgaaaccatgctgctttaaaaaaacaaacaaacaaaaagaaacccattaatgttttcccaaagctttgtggacacattgaagcttcttgtttcagcttctgccaacatttctcgctccagcaaactttcttctgcttcccaaatatgacaagcttcttctttaacttttctgccaggttaatcttgactcatttcaagagaggcttgggtcagccagggcctactctaagaagtttctttagcccttatgttttcctatggagagcacacactagctttaagtcctgagggtacttaagatgatatttcaatgtttttgtactcttagtgcttggcatatggtgggtggtctacaaatttagaacaatgtagtgaaccacaaactcctctcttcagcctgtgtgcttacttgtagtagttgtctgatctctaaaatttagaactgaatatgccaagaaagagttcaatttcagagaggagggtatggtttcattttaagtataaaagcttcctttaaaaaaaattacgtcttacattttgttatgctcctaagtgtaattgatcctggaaagtaagcgcaaggctactctctaatgctaactcttatgtatgtaagaggtgaggaaggagaggttgtgtgtggtgcatttgttttgtaaaagcatctaactgttttctttccagacactttttcaaaaatggcaatggtatcagaattcctcaagcaggcctggtttattgaaaatgaagagcaggaatatgttcaaactgtgaagtcatccaaaggtggtcccggatcagcggtgagcccctatcctaccttcaatccatcctcggatgtcgctgccttgcataaggccataatggttaaaggtgtggatgaagcaaccatcattgacattctaactaagcgaaacaatgcacagcgtcaacagatcaaagcagcatatctccaggaaacaggaaagcccctggatgaaacactgaagaaagcccttacaggtcaccttgaggaggttgttttagctctgctaaaaactccagcgcaatttgatgctgatgaacttcgtgctgccatgaagggccttggaactgatgaagatactctaattgagattttggcatcaagaactaacaaagaaatcagagacattaacagggtctacagagaggaactgaagagagatctggccaaagacataacctcagacacatctggagattttcggaacgctttgctttctcttgctaagggtgaccgatctgaggactttggtgtgaatgaagacttggctgattcagatgccagggccttgtatgaagcaggagaaaggagaaaggggacagacgtaaacgtgttcaataccatccttaccaccagaagctatccacaacttcgcagagtgtttcagaaatacaccaagtacagtaagcatgacatgaacaaagttctggacctggagttgaaaggtgacattgagaaatgcctcacagctatcgtgaagtgcgccacaagcaaaccagctttctttgcagagaagcttcatcaagccatgaaaggtgttggaactcgccataaggcattgatcaggattatggtttcccgttctgaaattgacatgaatgatatcaaagcattctatcagaagatgtatggtatctccctttgccaagccatcctggatgaaaccaaaggagattatgagaaaatcctggtggctctttgtggaggaaactaaacattcccttgatggtctcaagctatgatcagaagactttaattatatattttcatcctataagcttaaataggaaagtttcttcaacaggattacagtgtagctacctacatgctgaaaaatatagcctttaaatcatttttatattataactctgtataatagagataagtccattttttaaaaatgttttccccaaaccataaaaccctatacaagttgttctagtaacaatacatgagaaagatgtctatgtagctgaaaataaaatgacgtcacaagacaa

SEQ ID NO: 7228 - DNA, 4388 bp, Homo sapiens
agtcttgtagtcgctactttataaccggtccctagaagggggcggttctttccggaaattatgactgcagctgttttcactccgctgtgactcagagcgctccgggctgcaggagaggaagcccagcctgttctaccagagaacttgcccaggtcagaggtctgcgtagaagcccttttctgagcatcctctcctctcctcacacctgccactgtcctctgcgttgctgtcgaattaaatcttgcatcaccatggtgcacttctgtggcctactcaccctccaccgggagccagtgccgctgaagagtatctctgtgagcgtgaacatttacgagtttgtggctggtgtgtctgcaactttgaactacgagaatgaggagaaagttcctttggaggccttctttgtgttccccatggatgaagactctgctgtttacagctttgaggccttggtggatgggaagaaaattgtagcagaattacaagacaagatgaaggcccgcaccaactatgagaaagccatctcccagggccaccaggccttcttattggagggggacagcagctccagggatgtcttctcttgcaatgtgggtaacctccaacctgggtcgaaggcggcagtcaccctgaagtatgtgcaggagctgcctctggaagcagatggggctctgcgctttgtgctcccagctgtcctgaatcctagataccagttctctgggtcgtctaaggacagttgccttaatgtgaagactcctatagtccctgtggaggacctgccctacacactcagcatggtcgccaccatagattcccagcatggcattgagaaggtccaatccaactgccccttgagtcctaccgagtacctaggagaggacaagacttctgctcaggtttccctggctgctggacacaagtttgatcgggacgtggaactcctgatttactacaatgaggtgcatacccccagcgtggttttggagatggggatgcctaacatgaagccaggtcatttgatgggagatccatctgcaatggtgagtttctatccaaatatcccagaagatcaaccatcaaatacctgtggagagtttatctttctcatggaccgctcgggaagtatgcagagccccatgagtagccaggatacatctcagctgcgaatacaggcagccaaggaaacactgattttgctgctgaagagtttacctataggctgttatttcaacatctatggatttggctcttcctatgaggcatgctttccggagagtgtgaagtacactcagcaaacaatggaggaggctctggggagagtgaagcttatgcaggccgacctagggggcactgaaatcttggcaccactccagaacatttacaggggaccctccatcccaggccaccccctacagctttttgtctttacagatggagaagttacagacacgtttagtgtaattaaagaagttaggatcaacagacagaaacacaggtgtttctcatttggtattggagaaggcacctccaccagcctaataaaaggtattgcccgggcatcagggggcacctcagaatttatcacaggcaaagacaggatgcagtccaaggctctcaggactctgaaacgctctctgcagcctgtggtagaggatgtctctctgagctggcatttgcctcctggtctgtctgctaaaatgctttccccagaacagactgtcatctttaggggtcagagattaatcagctatgcccagctgaccgggaggatgccagcagcagagacaacaggagaagtatgcctcaaatatacactccagggcaagacttttgaggataaggtgacatttcctctacaacccaagcctgatgtcaacctcaccattcaccgccttgctgccaagtccttgctccagaccaaggacatgggcctcagggagactccagcaagtgataaaaaagatgcattgaaccttagccttgagtctggtgtcataagctccttcacagctttcattgctatcaataaggagctcaacaagccggttcaggggcctctggctcatagggacgtcccaaggccaattctgttgggtgcttctgccccattgaagataaaatgccaatcaggttttcgaaaggccttacactctgaccgtcctccttctgcatctcagcccagaggggaacttatgtgttataaggccaagacattccagatggacgattacagtctctgtgggttgataagtcacaaggaccagcacagtccaggctttggagagaatcaccttgtgcagctgatttaccaccaaaatgcaaatggttcctgggatctgaatgaagatctagccaagatcctaggtatgagtttggaagaaataatggctgcacagcctgccgagcttgtggattcctcaggctgggccaccatcctggccgtgatctggctgcacagcaatggtaaggacttgaagtgtgaatgggagcttctggaaaggaaggccgtggcctggatgcgtgcccatgcaggctccaccatgccttcggttgtgaaagctgctattactttcctgaagtcatctgtggatcctgctatctttgccttttgaagataccatccagaaaaagaagtgcctttaatttgctactgtcatttcctctagtatcacttttgctgtgatgatgtgttcttgtgtattataactctttattttttgccataaaagtaaaggatgcttactccacttcgcttctctgctccaggttcactttggatatgatctttcttttcccaacatatgccctcagaaaagtgacagtggtcccagaacctattccctttcttgagggagttcaaaacattcataggcagtaatgttcctcccagggtttccagggaaacaacatgaaaaacaggtgacatgaactacagactaaagattgcagcatttatgttagagaatgcttgaattagagaattttctgcattatctttgtctgttcactttctatcttatatacttatcagggccatactggtaagcttgcgtaggaggagttagagggaagttgaaagccaacatctggatcaatgtaatgtcaagatcacaaagacagagactgcaggggtccactgtgagaggtgacactgttggggaccttcctgattcattcttcttgggctttgctagcctgtacaacctacatgtcttttcttccactgcctgaaagacttgggttgaactataactgttggagagagatgttcctctttaatcatgaaacaccttaagaagtctataatgcaatccttagtcctaccctgaacctatgtgtcctctaagtcaggccctgatctagtgcagtaaagggaagggtgggcttaatgggagctttgcctgggacctgaacctggagcacttaccgcattaggaagaaaggagctccccgtaatcgttcctgacccttgtgtctcatataccctatcctggtggaaatgaccctatttgatatgctgtcccttaaaataacttgtatcaatattaaaatgactatttctaccctttgatgagtaaatgcagtggttcttaaagtggtctcgtctccctaccccacaatattttggtactgccactttgggaagccaaactaggatagtaaattgaccggaacacagttgtggaaatttgacctgaagttagtgaaataaaacttagtagggaaaaaaagcttagcaagaggtctactcctccatagattcatttattgaacttacattggttttattgtcccttgttttctgttccagcttttctgatgcctccactgttcccatggtatcctgaccctctatcttctgttgtaggctgacttcttttatatgaagcaagtaaaggatactaataagaataccactgtagaatcctgaccatacccttaaatagttatgtgatgatgggcaaatgatttcaccctcaggcacttaatatcctcatctgtaaaactaagggattaaactagaactttattaacactttcgagttccactcagaattcctagaggaacatcggtgacttttcactcagaaagtgggtggactaggcctgagtttctttaagttgttgagttacctggtattaggaagacttgtgtgacttgcatagtggactctaatctctcagtctttcttccaagtttgtttatgctgaatgtgatctgcggaacagggttgttagaaatgcagctttttagaaatgcagaattttaatcgataccaggaactactttatttaacaaggctcccaggtatcatgcatgcacattgaagtttgaaaagtaaaggcttaatattttcatgaaataggcttatatccaagcctgccat

SEQ ID NO: 7229 - DNA, 1722 bp, Homo sapiens
aaaaagaccatgagtacagatgaaggcacctatatgtgtattgctgagaatcgggttggaaaaatggaagcctctgctacactcaccgtccgaggtggagttatagctcccccacagtttgtggttcggccaagagatcagattgttgctcaaggtcgaacagtgacatttccctgtgaaactaaaggaaacccacagccagctgttttttggcagaaagaaggcagccagaacctacttttcccaaaccaaccccagcagcccaacagtagatgctcagtgtcaccaactggagacctcacaatcaccaacattcaacgttccgacgcgggttactacatctgccaggctttaactgtggcaggaagcattttagcaaaagctcaactggaggttactgatgttttgacagatagacctccacctataattctacaaggcccagccaaccaaacgctggcagtggatggtacagcgttactgaaatgtaaagccactggtgatcctcttcctgtaattagctggttaaaggagggatttacttttccgggtagagatccaagagcaacaattcaagagcaaggcacactgcagattaagaatttacggatttctgatactggcacttatacttgtgtggctacaagttcaagtggagagacttcctggagtgcagtgctggatgtgacagagtctggagcaacaatcagtaaaaactatgatttaagtgacctgccagggccaccatccaaaccgcaggtcactgatgttactaagaacagtgtcaccttgtcctggcagccaggtacccctggaacccttccagcaagtgcatatatcattgaggctttcagccaatcagtgagcaacagctggcagaccgtggcaaaccatgtaaagaccaccctctatactgtaagaggactgcggcccaatacaatctacttattcatggtcagagcgatcaacccccaaggtctcagtgacccaagtcccatgtcagatcctgtgcgcacacaagatatcagcccaccagcacaaggagtggaccacaggcaagtgcagaaagagctaggagatgtccttgtccgtcttcataatccagttgtgctgactcccaccacggttcaggtcacatggacggttgatcgccaaccccagtttatccaaggctaccgagtgatgtatcgtcagacttcaggtctgcaggcgacatcttcgtggcagaatttagatgccaaagtcccgactgaacgaagtgctgtcttagtcaacctgaaaaagggggtgacttatgaaattaaagtacggccatattttaatgagttccaaggaatggatagtgaatctaaaacggttcgtactactgaagaagccccaagtgccccaccacagtctgtcactgtactgacagttggaagctacaatagcacaagtattagtgtttcctgggatcctcctcctccagatcaccagaatggaattatccaagaatacaagatctggtgtctaggaaatgaaacgcgattccatatcaacaaaactgtggatgcagccattcggtccgtaataattggtggattattcccaggtattcaataccgggtagaggttgcagctagtaccagtgcaggggttggagtaaagagtgagccacagccaaataacacaggctaccccatatgccacgacacagatcttgcattccaacagcatacatga

SEQ ID NO: 7230 - DNA, 1025 bp, Homo sapiens; identical to SEQ ID NO: 6638

SEQ ID NO: 7231 - DNA, 580 bp, Homo sapiens
aatcttgcctttctcccaccccaggaaggagaagaggacaaagatactcagagagaaaaagtaaaagaccgaagaaggaggctggagagaccaggatccttccagctgaacaaagtcagccacaaagcagactagccagccggctacaattggagtcagagtcccaaagacatgggcttgttagagtgctgtgcaagatgtctggtaggggccccctttgcttccctggtggccactggattgtgtttctttggggtggcactgttctgtggctgtggacatgaagccctcactggcacagaaaagctaattgagacctatttctccaaaaactaccaagactatgagtatctcatcaatgtgatccatgccttccagtatgtcatctatggaactgcctctttcttcttcctttatggggccctcctgctggctgagggcttctacaccaccggcgcagtcaggcagatctttggcgactacaagaccaccatctgcggcaagggcctgagcgcaacggtaacagggggccagaaggggaggggttccagaggccaacatcaagctcattctttggagc

SEQ ID NO: 7232 - DNA, 6052 bp, Homo sapiens; identical to SEQ ID NO: 1741

SEQ ID NO: 7233 - DNA, 2521 bp, Homo sapiens
ggaaaacggccagcctgaggagctgctgcgagggtccgcttcgtctttcgagagtgactcccgcggtcccaaggctttccagagcgaacctgtgcggctgcaggcaccggcgtgttgagtttccggcgttccgaaggactgagctcttgtcgcggatcccgtccgccgtttccagcccccagtctcagagcggagcccacagagcagggcaccggcatggccaaagccgcggcgatcggcatcgacctgggcaccacctactcctgcgtgggggtgttccaacacggcaaggtggagatcatcgccaacgaccagggcaaccgcaccacccccagctacgtggccttcacggacaccgagcggctcatcggggatgcggccaagaaccaggtggcgctgaacccgcagaacaccgtgtttgacgcgaagcggctgatcggccgcaagttcggcgacccggtggtgcagtcggacatgaagcactggcctttccaggtgatcaacgacggagacaagcccaaggtgcaggtgagctacaagggggagaccaaggcattctaccccgaggagatctcgtccatggtgctgaccaagatgaaggagatcgccgaggcgtacctgggctacccggtgaccaacgcggtgatcaccgtgccggcctacttcaacgactcgcagcgccaggccaccaaggatgcgggtgtgatcgcggggctcaacgtgctgcggatcatcaacgagcccacggccgccgccatcgcctacggcctggacagaacgggcaagggggagcgcaacgtgctcatctttgacctgggcgggggcaccttcgacgtgtccatcctgacgatcgacgacggcatcttcgaggtgaaggccacggccggggacacccacctgggtggggaggactttgacaacaggctggtgaaccacttcgtggaggagttcaagagaaaacacaagaaggacatcagccagaacaagcgagccgtgaggcggctgcgcaccgcctgcgagagggccaagaggaccctgtcgtccagcacccaggccagcctggagatcgactccctgtttgagggcatcgacttctacacgtccatcaccagggcgaggttcgaggagctgtgctccgacctgttccgaagcaccctggagcccgtggagaaggctctgcgcgacgccaagctggacaaggcccagattcacgacctggtcctggtcgggggctccacccgcatccccaaggtgcagaagctgctgcaagacttcttcaacgggcgcgacctgaacaagagcatcaaccccgacgaggctgtggcctacggggcggcggtgcaggcggccatcctgatgggggacaagtccgagaacgtgcaggacctgctgctgctggacgtggctcccctgtcgctggggctggagacggccggaggcgtgatgactgccctgatcaagcgcaactccaccatccccaccaagcagacgcagatcttcaccacctactccgacaaccaacccggggtgctgatccaggtgtacgagggcgagagggccatgacgaaagacaacaatctgttggggcgcttcgagctgagcggcatccctccggcccccaggggcgtgccccagatcgaggtgaccttcgacatcgatgccaacggcatcctgaacgtcacggccacggacaagagcaccggcaaggccaacaagatcaccatcaccaacgacaagggccgcctgagcaaggaggagatcgagcgcatggtgcaggaggcggagaagtacaaagcggaggacgaggtgcagcgcgagagggtgtcagccaagaacgccctggagtcctacgccttcaacatgaagagcgccgtggaggatgaggggctcaagggcaagatcagcgaggcggacaagaagaaggttctggacaagtgtcaagaggtcatctcgtggctggacgccaacaccttggccgagaaggacgagtttgagcacaagaggaaggagctggagcaggtgtgtaaccccatcatcagcggactgtaccagggtgccggtggtcccgggcctggcggcttcggggctcagggtcccaagggagggtctgggtcaggccctaccattgaggaggtggattaggggcctttgttctttagtatgtttgtctttgaggtggactgttgggactcaaggactttgctgctgttttcctatgtcatttctgcttcagctctttgctgcttcacttctttgtaaagttgtaacctgatggtaattagctggcttcattatttttgtagtacaaccgatatgttcattagaattctttgcatttaatgttgatactgtaagggtgtttcgttccctttaaatgaatcaacactgccaccttctgtacgagtttgtttgttttttttttttttttttttttttgcttggcgaaaacactacaaaggctgggaatgtatgtttttataatttgtttatttaaatatgaaaaataaaatgttaaactttt

SEQ ID NO: 7234 - DNA, 497 bp, Homo sapiens
aagactttaactaggggcgcgcagatgtgtgaggccttttattgtgagagtggacagacatccgagatttcagagccccatattcgagccccgtggaatcccgcggcccccagccagagccagcatgcagaacagtcacagcggagtgaatcagctcggtggtgtctttgtcaacgggcggccactgccggactccacccggcagaagattgtagagctagctcacagcggggcccggccgtgcgacatttcccgaattctgcagacccatgcagatgcaaaagtccaagtgctggacaatcaaaacgtgtccaacggatgtgtgtcatcaataaacagagttcttcgcaacctggctagcgaaaagcaacagatgggcgcagacggcatgtatgataaactaaggatgttgaacgggcagaccggaagctggggcacccgccctggttggtatccggggacttcggtgccagggcaacctacgcaagatggctgcc

SEQ ID NO: 7235 - DNA, 3673 bp, Homo sapiens
tcagaagaggcagaagtggatgtgagagaaagagagacacagagagacagagagccaaagagggcaagagacttgactttaagagactcctgtactgacaactccatgcagttcggaaccagaacgactacggctgaaccagggttcatggggacatggcaaaacgctgatactaacctcttattcagaatgtcccaacaggccatccgttgcacactggtaaactgcacatgtgaatgttttcagccagggaagattaacctgaggacttgtgatcagtgtaaacatggctgggtggcacatgccttggataagctcagcacgcagcacctgtaccaccccacccaagtggagattgtgcagtccaacgtcgtgtttgacatcagcagcctgatgctctatgggacacaagcagtgcctgtgcggctaaagatcctgctggaccgtctcttcagcgtcctgaagcaagaggaggtactgcacatactgcacggccttggctggactctgcgggactatgtccgaggatacatccttcaggatgctgctggcaaggtgctggaccgctgggccatcatgtctcgagaagaggaaatcatcacccttcagcagtttctgcggtttggagaaaccaaatccattgtggagctgatggcaattcaggagaaagaagggcaggccgtggctgtaccatcttcaaagacagactcagatataaggactttcattgagagcaataatcgcaccaggagtcccagcctccttgctcacttagagaacagcaatccttccagcattcatcacttcgaaaacatcccaaacagccttgcatttctgcttccattccagtacataaaccctgtctcagcaccactgctagggttgcctccaaatgggctactgttagagcaaccagggttgaggctgcgggaacccagcctttcaactcagaatgaatataatgagagcagcgaatccgaagtttctcccacaccttataagaatgatcaaacacccaatagaaatgccctgaccagcattactaatgtggagcccaaaaccgagccagcctgtgtctctcccattcagaattctgccccagtcagtgatctaaccaaaactgaacacccaaaaagctcattccggattcatcggatgagaaggatggggtcagcctctaggaaaggaagagtgttctgtaatgcatgtgggaagacattctatgacaaaggtactctcaaaattcattacaatgctgttcacctgaagatcaaacatcgatgcaccattgaaggttgcaacatggtctttagctccctccgaagtcgtaatcgccacagtgcaaaccccaatcctcgccttcacatgcctatgctaaggaataaccgagataaagatttaattcgggccacctcaggagctgccacccctgtcatagcaagtacaaaatcaaatctggcactcacaagccctggccgacccccaatgggttttaccactccccctctagaccctgtcttgcaaaatcctctccctagccagctagtattttctgggctaaagactgtacaaccagttcctccattttatagaagtttactcactccaggggaaatggtgagtcctccaacctccctcccaaccagtcccatcattccaaccagtggtaccatagagcagcaccccccgccaccctctgagccagtagtgccagcagtgatgatggccacccatgagcccagtgctgacctggcacccaagaaaaagcccaggaagtcaagcatgcctgtgaagattgagaaggaaattattgataccgccgatgagtttgatgatgaagatgatgaccccaatgatggtggagctgtggtcaatgacatgagccatgacaatcattgtcactcccaagaggagatgagcccaggcatgtctgtgaaggacttttctaagcataacaggacccggtgcatttcaaggactgaaataaggagggccgacagcatgacttctgaagaccaagaacctgagcgggactatgagaacgagtctgagtcttcggagcccaaactgggcgaggaatccatggaaggggatgagcacattcacagcgaagtgagtgaaaaagtcctgatgaatagtgagaggcctgatgagaaccacagtgagccctctcaccaggacgtcatcaaggtgaaggaagaatttacagaccccacttacgacatgttttacatgagccagtatggactgtacaatggtgggggtgccagcatggccgccttgcatgagagctttacatcgtctctgaattatggcagccctcaaaagttctccccagaaggtgacctatgttctagcccagaccccaaaatctgttatgtgtgcaagaagagtttcaaaagctcctacagtgtgaaacttcactacaggaacgttcacttgaaagagatgcacgtctgcacagtggctggttgcaatgctgcattcccctctcgccgaagccgagacagaaacagaaatttacggatggaaagaaccataggtccaggacatcgagacagcctgcatctcctgccaacataaacctacatcgtaaactgttgaccaaagaactcgatgacatgggcctggactcgtcgcagccctcccttagcaaggacctccgcgatgaatttttggtgaagatatatggtgcccagcaccccatggggctcgatgtcagggaagacgcctcctctcccgcagggactgaagactcccacctgaacgggtatgggagaggcatggcagaggactacatggtccttgacttgagcaccacctccagcctccagtccagcagcagtatccattcctccagagaatccgacgcaggcagcgatgaggggattcttctcgatgacattgacggggcgagtgacagtggggagtcggcacacaaggccgaggcccctgccctccctggcagcctaggggctgaagtttcaggatctcttatgttcagcagcttgtctgggagcaatggtgggatcatgtgcaacatttgccacaaaatgtacagcaacaaggggaccctgagagtgcactacaaaactgtgcatttgagagaaatgcacaagtgcaaagtcccaggttgcaatatgatgttttcctctgtacgaagccgaaatcggcacagtcagaaccctaatctccacaaaaacattcccttcacttcagtagattagtctcagaatggacactacaaatgccagctctcaccagatggcctacgtgtttgaactgccatagtcagtgtgcgcttatgtacttggggtgtgtgtgtgtgtgtgtgtgtgtgtgcatttatgtatgctctgtggctacatatacacacacgtatttccttgagataaacaagataaacactaggtgcttttgaatttttttcacttccctttatagttttgggaaaggagtgggatctttgatttcagggtgaaaacagagtacccctttaaacacacacacacacacatgcacatacacacacacacacacacacacacacagtgtgcaactagccccagttttgacagaataattcttggtcttccccaaagagacaatttgttgtacccatgactgttgcctgcaaaaataaaagggaaaaaaaagaaaaaagaaacaaaaa

SEQ ID NO: 7236 - DNA, 1744 bp, Homo sapiens
agattcagccagcacactcctcgcgagcaagcattactctactgactggcagagacaggagaggtagatgtccacgcccacagaccctggtgcgatgccccacccagggccttcgccggggcctgggccttcccctgggccaattcttgggcctagtccaggaccaggaccatccccaggttccgtccacagcatgatggggccaagtcctggacctccaagtgtctcccatcctatgccgacgatggggtccacagacttcccacaggaaggcatgcatcaaatgcataagcccatcgatggtatacatgacaaggggattgtagaagacatccattgtggatccatgaagggcactggtatgcgaccacctcacccaggcatgggccctccccagagtccaatggatcaacacagccaaggttatatgtcaccacacccatctccattaggagccccagagcacgtctccagccctatgtctggaggaggcccaactccacctcagatgccaccaagccagccgggggccctcatcccaggtgatccgcaggccatgagccagcccaacagaggtccctcacctttcagtcctgtccagctgcatcagcttcgagctcagattttagcttataaaatgctggcccgaggccagcccctccccgaaacgctgcagcttgcagtccaggggaaaaggacgttgcctggcttgcagcaacaacagcagcagcaacagcagcagcagcagcagcagcagcagcagcagcagcagcaacagcagccgcagcagcagccgccgcaaccacagacgcagcaacaacagcagccggcccttgttaactacaacagaccatctggcccggggccggagctgagcggcccgagcaccccgcagaagctgccggtgcccgcgcccggcggccggccctcgcccgcgccccccgcagccgcgcagccgcccgcggccgcagtgcccgggccctcagtgccgcagccggccccggggcagccctcgcccgtcctccagctgcagcagaagcagagccgcatcagccccatccagaaaccgcaaggcctggaccccgtggaaattctgcaagagcgggaatacagacttcaggcccgcatagctcataggatacaagaactggaaaatctgcctggctctttgccaccagatttaagaaccaaagcaaccgtggaactaaaagcacttcggttactcaatttccagcgtcagctgagacaggaggtggtggcctgcatgcgcagggacacgaccctggagacggctctcaactccaaagcatacaaacggagcaagcgccagactctgagagaagctcgcatgaccgagaagctggagaagcagcagaagattgagcaggagaggaaacgccgtcagaaacaccaggaatacctgaacagtattttgcaacatgcaaaagattttaaggaatatcatcggtctgtggccggaaagatccagaagctctccaaagcagtggcaacttggcatgccaacactgaaagagagcagaagaaggagacagagcggattgaaaaggagagaatgcggcgactgatggctgaagatgaggagggttatagaaaactgattgatcaaaagaaagacaggcgtttagcttaccttttgcagcagaccgatgagtatgtagccaatctgaccaatctggtttgggagcacaagcaagcccaggcagccaaagagaagaagaagagg

SEQ ID NO: 7237 - DNA, 778 bp, Homo sapiens
atgatgatcctgcaggtttcagggggcccctggacagtggctctgacagcattactgatggtgctgctcatatctgtggtccagagcagggccactccagagaattccgtctaccaggaacggcaggaatgctatgcgttcaatgggactcagcgcgttgtggacgggctcatctacaaccgggaggaatacgtgcattttgacagcgcagtgggggagttcctagcagtgatggagctggggcggcccataggcgagtacttcaatagccagaaggactttatggaacggaagcgagccgaggtggacaaggtgtgcagacacaagtacgagctgatggagccactcatccggcagcgccgagagtccagcctagggtgaacatctcccctccaagaaggagccccagcagcaccacgacctgcttgtctaccacgtgacagatttctacccagacagcattcaagtccgatgcttcctgaatggacaggaggaaacagctggggtcgtgtccaccaacctgatccgtaatggagactggaccttccagatcctggagatgctggaaatgaccccccagcagggaaacatctacacctgccaagtggagcaccccagcctggacagtcctgtcactgtggagtggaaggcacagtctgattctgtgcagagcaagatgctgacaggagccaggggcttcatgctggggctcatcatctgtggagtgggcatcttcacgcacagaaggagcaagaaagttcaacaaggatctgcataa

SEQ ID NO: 7238 - DNA, 2450 bp, Homo sapiens
tataacactaccaaggtagcatctgcctaagccagaaataacaataggatataatataacctagttacaaatgaggtcctgccatctgtgctataccttcttaagtggggtttggatgataaaatcctgatttaaacgtcagtagataagtgtattttattgatagaagatgttgaatttcttctgttcacttgcttttaaaaaagataaaccccacttgaaaaactgaggtgcttaaggagtaaaataatatgttcctggtggcatcctccagatcgtactgagaagcactccacaatgccagactcacctgtggatgtgaagacgcaatctaggctgactcctccaacaatgccacctcccccaactactcaaggagctccaagaaccagttcatttacaccgacaacgttaactaatggcacgagccattctcctacagccttgaatggcgccccctcaccacccaatggcttcagcaatgggccttcctcttcttcctcctcctctctggctaatcaacagctgcccccagcctgtggtgccaggcaactcagcaagctgaaaaggttccttactaccctgcagcagtttggcaatgacatttcacccgagataggagaaagagttcgcaccctcgttctgggactagtgaactccactttgacaattgaagaatttcattccaaactgcaagaagctactaacttcccactgagaccttttgtcatcccatttttgaaggccaacttgcccctgctgcagcgtgagctcctccactgcgcaagactggccaaacagaaccctgcccagtacctcgcccagcatgaacagctgcttctggatgccagcaccacctcacctgttgactcctcagagctgcttctcgatgtgaacgaaaacgggaagaggcgaactccagacagaaccaaagaaaatggctttgacagagagcctttgcactcagaacatccaagcaagcgaccatgcactattagcccaggccagcggtacagtccaaataacggcttatcctaccagcccaatggcctgcctcaccctaccccacctccacctcagcattaccgtttggatgatatggccattgcccaccactacagggactcctatcgacaccccagccacagggacctcagggacagaaacagacctatggggttgcatggcacacgtcaagaagaaatgattgatcacagactaacagacagagaatgggcagaagagtggaaacatcttgaccatctgttaaactgcataatggacatggtagaaaaaacaaggcgatctctcaccgtactaaggcggtgtcaagaagcagaccgggaagaattgaattactggatccggcggtacagtgacgccgaggacttaaaaaaaggtggcggcagtagcagcagccactctaggcagcagagtcccgtcaacccagacccagttgcactagacgcgcatcgggaattccttcacaggcctgcgtctggatacgtgccagaggagatctggaagaaagctgaggaggccgtcaatgaggtgaagcgccaggcgatgacggagctgcagaaggccgtgtctgaggcggagcggaaagcccacgacatgatcacaacagagagggccaagatggagcgcacggtcgccgaggccaaacggcaggcggcggaggacgcactggcagttatcaatcagcaggaggattcaagcgagagttgctggaattgtggccgtaaagcgagtgaaacctgcagtggctgtaacacagcccgatactgtggctcattttgccagcacaaagactgggagaagcaccatcacatctgtggacagaccctgcaggcccagcagcagggagacacacctgcagtcagctcctctgtcacgcccaacagcggggctgggagcccgatggacacaccaccagcagccactccgaggtcaaccaccccgggaaccccttccaccatagagacaacccctcgctagacgtgaactcagaactgtcggaggaaagacaacacaaccaacgcgaaaccaattcctcatcctcagatgctcaaagttgttttttttgtttgtttgtttattagatgaattatcctatttcagtacttcagcaagagagaacctaactgtatcttgaggtggtagtaaaacacagagggccagtaacgggtcgtaatgacttattgtggataacaaagatatcttttctttagagaactgaaaagagagcagagaatataacatgaaatgatagatttgacctcctccctgttattttcaagtagctgggattttaaactagatgacctcattaaccgatgctttaccaaacagcaaaccaagagattgctaattgctgttgaaagcaaaaatgctaatattaaaagtcacaatgttctttatatacaataatggaaaaaaaaaaaaga

SEQ ID NO: 7239 - DNA, 931 bp, Homo sapiens
gggcggcggcgcgcgggtgcgatcgcggagctgtgaggcgcaggcagggctctggggcacctagagaccggggccggagacgtggcagccgccctgcccgccagaaagtttcctagaagtttgctgggcgcgggcgcacgactgactggctggaccatgaacgtgttccgaatcctcggcgacctgagccacctcctggccatgatcttgctgctggggaagatctggaggtccaagtgctgcaagggcatctctgggaagagccagatcctgtttgctctcgtcttcaccaccaggtacctggacctgttcaccaacttcatctccatctacaacacagtaatgaaggtggtttttctcctctgtgcctatgttacagtgtacatgatatatgggaaattccgtaaaacttttgacagtgagaatgacacattccgcctggagtttcttctggtcccagtcattggcctttccttccttgaaaactacagtttcactctgctggagatcctctggactttctctatctatctggaatcagtggctatcctgccccagctcttcatgatcagcaagactggagaggctgagaccataactactcactacctgttctttctgggtctgtaccgggcactctacctggctaactggatcaggcggtaccagactgagaatttctatgaccaaattgcagtcgtgtctggagtagtacaaaccatcttctactgtgacttcttctacttgtatgtgaccaaaggtaggtcctgggatgacagcaatgctgacactggcctaaggagttactcatccatttaataagtattccagcagatacagatgtgaacagtcaagtctctgccatccacaatgcttgtgttctaatgcaagaagacaaatattttcaataaagaaacaaatgccataaaaa

SEQ ID NO: 7240 - DNA, 1511 bp, Homo sapiens
ggagaagaggcctgaccttggcgctggggtccagtgggcattgctctggtccgaggctgctgctcttgacctctgctctgcggctgttttccattggagtagaggctcctcctgtcctgtcctgcctgtggagggaagcaaaccttcccctggaccagagagaggagaaagcggagacaggtagcaacgctgtggactggtgatgacaggctcttcagctccctgcaagtgaccgggcctggggaacagggcatggcacaggcacacaggaccccccagcccagggctgcccccagccagccccgtgtgttcaagctggttctcctgggaagtggctccgtgggtaagtccagcttggctcttcggtgcgttcttcacaaaggtggtggatgtgggtgccacctctctgaagcttgagatctgggacacagctggccaggagaagtaccacagcgtctgccacctctacttcaggggtgccaacgctgcgcttctggtgtacgacatcaccaggaaggattccttcctcaaggctcagcagtggctgaaggacctggaggaggagctgcacccaggagaagtcctggtgatgctggtgggcaacaagacggacctcagccaggagcgggaggtgaccttccaggaagggaaggagtttgccgacagccagaagttgctgttcatggaaacttcggccaaactgaaccaccaggtgtcggaggtgttcaatacagtggcccaagagctactgcagagaagcgacgaggagggccaggctctacggggggatgcagctgtggctctgaacaaggggcccgcgaggcaggccaaatgctgcgcccactaggtgcagccactcctgggggctgtggggaagacaccccctgcctgggccatggccagctctaggtggattctgattcactgtcaatgctgggttgctcccgagccctagatgttcctggaagttggccccctttatgaaaaccacttcccacagccagtgggaactgccagaggaagatctggcgtcacatggctcccaggaaagtgctgtgccctatccccactgataccatctgattccccgatgcctgtgcctgttccacctggacggtggccccctcagcctggcagcctctggacagagaggaaggaaggattggaaaagtccccgcagcacagcgacggtgggaagatgccttacgtctgatcttgatgggggcactggcctggagcctgggcccacctgcttctggggggttggggagcaggccagatggaggtggtggtgccaggaagaaatggagcgatgactgactgtggggtgggcccaggatttccacatcttggtgaagttgcccctgggaagggcagctgggggcagtggcgccagttcccttccatggtctcccggctggcaatgtggtgaagctgagtttctgtccaatgagcaggaagattctgagacatttcgcctgagatataagttgtactgcgtatgcagtttt

SEQ ID NO: 7241 - DNA, 1768 bp, Homo sapiens
gcggaccccagcctctgccaggttcggtccgccatcctcgtcccgtcctccgccggcccctgccccgcgcccagggatcctccagctcctttcgcccgcgccctccgttcgctccggacaccatggacaagttttggtggcacgcagcctggggactctgcctcgtgccgctgagcctggcgcagatcgatttgaatataacctgccgctttgcaggtgtattccacgtggagaaaaatggtcgctacagcatctctcggacggaggccgctgacctctgcaaggctttcaatagcaccttgcccacaatggcccagatggagaaagctctgagcatcggatttgagacctgcagctccacctgaagaagattgtacatcagtcacagacctgcccaatgcctttgatggaccaattaccataactattgttaaccgtgatggcacccgctatgtccagaaaggagaatacagaacgaatcctgaagacatctaccccagcaaccctactgatgatgacgtgagcagcggctcctccagtgaaaggagcagcacttcaggaggttacatcttttacaccttttctactgtacaccccatcccagacgaagacagtccctggatcaccgacagcacagacagaatccctgctaccagagaccaagacacattccaccccagtggggggtcccataccactcatggatctgaatcagatggacactcacatgggagtcaagaaggtggagcaaacacaacctctggtcctataaggacaccccaaattccagaatggctgatcatcttggcatccctcttggccttggctttgattcttgcagtttgcattgcagtcaacagtcgaagaaggtgtgggcagaagaaaaagctagtgatcaacagtggcaatggagctgtggaggacagaaagccaagtggactcaacggagaggccagcaagtctcaggaaatggtgcatttggtgaacaaggagtcgtcagaaactccagaccagtttatgacagctgatgagacaaggaacctgcagaatgtggacatgaagattggggtgtaacacctacaccattatcttggaaagaaacaaccgttggaaacataaccattacagggagctgggacacttaacagatgcaatgtgctactgattgtttcattgcgaatcttttttagcataaaattttctactctttttgttttttgtgttttgttctttaaagtcaggtccaatttgtaaaaacagcattgctttctgaaattagggcccaattaataatcagcaagaatttgatcgttccagttcccacttggaggcctttcatccctcgggtgtgctatggatggcttctaacaaaaactacacatatgtattcctgatcgccaacctttcccccaccagctaaggacatttcccagggttaatagggcctggtccctgggaggaaatttgaatgggtccattttgcccttccatagcctaatccctgggcattgctttccactgaggttgggggttggggtgtactagttacacatcttcaacagaccccctctagaaatttttcagatgcttctgggagacacccaaagggtgaagctatttatctgtagtaaactatttatctgtgtttttgaaatattaaaccctggatcagtcctttgatcagtataattttttaaagttactttgtcagaggcacaaaagggtttaaactgattcataataaatatctgtacttcttcgatcttca

SEQ ID NO: 7242 - DNA, 1724 bp, Homo sapiens
aactgccgcttgccgccattgacacgcacagatagaacccaaagaaaggcaaagagtcctgcccggcaccggcgccgcgtgggccaaacctgcgcccgtggaggggcgcgcagagggcaccgggcgccgggagcaggcggcgcagcaccagcattgtgttagtgccgggaggccactgtgtcagcaagctgagagggaaactgaagcaagatgtcgggccggagtgggaagaagaaaatgtccaagctgtcccgttcagctagggcaggtgtcatctttccagtggggaggctgatgcgttatctgaagaaagggacgttcaagtaccggatcagcgtgggcgcccctgtctacatggcggcagtcattgagtacctggcagcggaaattctagaattggccggcaatgccgcgagggacaacaagaaggcccggatagccccgagacacatcttgctggcagttgccaatgacgaggagctcaaccagtccaaaccaaaggacagcgataaagaaggaacttcaaattccacctctgaagatgggccaggggatggattcaccattctgtcttctaagagccttgttctgggacagaagctgtccttaacccagagtgacatcagccatattggctccatgagagtggagggcattgtccacccaaccacagccgaaattgacctcaaagaagatataggtaaagccttggaaaaggctgggggaaaagagttcttggaaacggtaaaggagcttcgcaaatcccaaggccctttggaagtcgccgaagccgccgtcagccaatccagtggactcgcagccaaatttgtcatccactgtcacatccctcagtggggctccgacaaatgtgaagaacagcttgaagagaccatcaaaaactgcctgtcagcggcggaggacaagaagctaaagtccgtcgcgttcccgcctttccccagcggcagaaactgctttcccaaacagactgcggcccaggtgaccctcaaagccatctcagcccactttgatgactcgagcgcgtcctcgctgaagaacgtgtacttcctgctcttcgacagcgagagcatcggcatctacgtgcaggagatggccaagctcgacgccaagtagccgccgcactttccagcagggatcggaggacgacccgagtcccaagagtggggttttgctttttaaaaggagagaggaggggtgatggcaggggagtggagggtggccgggcaggtcctgccggcgcagggagccctctgcccttcacactctcctccaaaagagcctccatctgtaaggaagcaggtctccgcgaggggtttctttccatgtgttttcctcctgttgttttagaacttttttaaaaaaacagacctcgttttagatttatagcattgacttttacacacattcacacaagaaaaaaatcctttcaaaattcttaaatcttctgttcctcctttttccaagggaagagggcaaaaagtggcctgggctctgttggtgtgcgtgttccgtggcggagagaagaaaatgggaaagacatctcactggtgcttttctcttttgttttagtgccccccgcccccatccctataatatctgtaactactcctaaaaaggttttgattcaggcttttttttggtttcattttgtttttttaagaaaaagaaaatgaaaggaaaaaaataaaagatccagtgtctttctt

SEQ ID NO: 7243 - DNA, 1197 bp, Homo sapiens
ctgacggacagacagacagacaccgcccccagccccagctaccacctcctccccggccggcggcggacagtggacgcggcggcgagccgcgggcaggggccggagcccgcgcccggaggcggggtggagggggtcggggctcgcggcgtcgcactgaaacttttcgtccaacttctgggctgttctcgcttcggaggagccgtggtccgcgcgggggaagccgagccgagcggagccgcgagaagtgctagctcgggccgggaggagccgcagccggaggagggggaggaggaagaagagaaggaagaggagagggggccgcagtggcgactcggcgctcggaagccgggctcatggacgggtgaggcggcggtgtgcgcagacagtgctccagccgcgcgcgctccccaggccctggcccgggcctcgggccggggaggaagagtagctcgccgaggcgccgaggagagcgggccgccccacagcccgagccggagagggagcgcgagccgcgccggccccggtcgggcctccgaaaccatgaactttctgctgtcttgggtgcattggagccttgccttgctgctctacctccaccatgccaagtggtcccaggctgcacccatggcagaaggaggagggcagaatcatcacgaagtggtgaagttcatggatgtctatcagcgcagctactgccatccaatcgagaccctggtggacatcttccaggagtaccctgatgagatcgagtacatcttcaagccatcctgtgtgcccctgatgcgatgcgggggctgctgcaatgacgagggcctggagtgtgtgcccactgaggagtccaacatcaccatgcagattatgcggatcaaacctcaccaaggccagcacataggagagatgagcttcctacagcacaacaaatgtgaatgcagaccaaagaaagatagagcaagacaagaaaaaaaatcagttcgaggaaagggaaaggggcaaaaacgaaagcgcaagaaatcccgtccctgtgggccttgctcagagcggagaaagcatttgtttgtacaagatccgcagacgtgtaaatgttcctgcaaaaacacagactcgcgttgcaaggcgaggcagcttgagttaaacgaacgtacttgcagatgtgacaagccgaggcggtgagccgggcaggaggaaggagcctccctc

SEQ ID NO: 7244 - DNA, 2369 bp, Homo sapiens
cctcattgcccagcggaccccagcctctgccaggttcggtccgccatcctcgtcccgtcctccgccggcccctgccccgcgcccagggatcctccagctcctttcgcccgcgccctccgttcgctccggacaccatggacaagttttggtggcacgcagcctggggactctgcctcgtgccgctgagcctggcgcagatcgatttgaatataacctgccgctttgcaggtgtattccacgtggagaaaaatggtcgctacagcatctctcggacggaggccgctgacctctgcaaggctttcaatagcaccttgcccacaatggcccagatggagaaagctctgagcatcggatttgagacctgcaggtatgggttcatagaagggcacgtggtgattccccggatccaccccaactccatctgtgcagcaaacaacacaggggtgtacatcctcacatccaacacctcccagtatgacacatattgcttcaatgcttcagctccacctgaagaagattgtacatcagtcacagacctgcccaatgcctttgatggaccaattaccataactattgttaaccgtgatggcacccgctatgtccagaaaggagaatacagaacgaatcctgaagacatctaccccagcaaccctactgatgatgacgtgagcagcggctcctccagtgaaaggagcagcacttcaggaggttacatcttttacaccttttctactgtacaccccatcccagacgaagacagtccctggatcaccgacagcacagacagaatccctgctaccagtacgtcttcaaataccatctcagcaggctgggagccaaatgaagaaaatgaagatgaaagagacagacacctcagtttttctggatcaggcattgatgatgatgaagattttatctccagcaccatttcaaccacaccacgggcttttgaccacacaaaacagaaccaggactggacccagtggaacccaagccattcaaatccggaagtgctacttcagacaaccacaaggatgactgatgtagacagaaatggcaccactgcttatgaaggaaactggaacccagaagcacaccctcccctcattcaccatgagcatcatgaggaagaagagaccccacattctacaagcacaatccaggcaactcctagtagtacaacggaagaaacagctacccagaaggaacagtggtttggcaacagatggcatgagggatatcgccaaacacccaaagaagactcccattcgacaacagggacagctgcagcctcagctcataccagccatccaatgcaaggaaggacaacaccaagcccagaggacagttcctggactgatttcttcaacccaatctcacaccccatgggacgaggtcatcaagcaggaagaaggatggatatggactccagtcatagtataacgcttcagcctactgcaaatccaaacacaggtttggtggaagatttggacaggacaggacctctttcaatgacaacgcagcagagtaattctcagagcttctctacatcacatgaaggcttggaagaagataaagaccatccaacaacttctactctgacatcaagcaataggaatgatgtcacaggtggaagaagagacccaaatcattctgaaggctcaactactttactggaaggttatacctctcattacccacacacgaaggaaagcaggaccttcatcccagtgacctcagctaagactgggtcctttggagttactgcagttactgttggagattccaactctaatgtcaatcgttccttatcaggagaccaagacacattccaccccagtggggggtcccataccactcatggatctgaatcagatggacactcacatgggagtcaagaaggtggagcaaacacaacctctggtcctataaggacaccccaaattccagaatggctgatcatcttggcatccctcttggccttggctttgattcttgcagtttgcattgcagtcaacagtcgaagaaggtgtgggcagaagaaaaagctagtgatcaacagtggcaatggagctgtggaggacagaaagccaagtggactcaacggagaggccagcaagtctcaggaaatggtgcatttggtgaacaaggagtcgtcagaaactccagaccagtttatgacagctgatgagacaaggaacctgcagaatgtggacatgaagattggggtgtaacacctacaccattatcttggaaagaaacaaccgttggaaacataaccattacagggagctgggacacttaacagatgcaatgtgctactgattgtttcattgcgaatcttttttagcataaaattttctactctt

SEQ ID NO: 7245 - DNA, 433 bp, Homo sapiens
agagatatctgtataagaagagactatctggattgaggacccgggatctttccctttaactttcgccccttggagttctccagttctgtgaatgaaaagaaaaagaaaaaaatgtcattagaagaggcgtaacacgtcagtccgtccccaggtttgtgtttcctggagtggccgaaagagatcagttctaacctgctctgcaggaataacggtcctgcctcccgacactcttggcgaggtttttgtacagtttgctccgggagctgtttcttcgcttccacctttttctcccccacacttcgcggcttcttcatgctttttcttctcaccatttctggccaaaactacaaacaagacttcgcagatcgagcctgcgtgctgccgaagcagggcgccgagtccatgcgaactgccatctgatccgctcttatca

SEQ ID NO: 7246 - DNA, 601 bp, Homo sapiens
ctttcctttgtccccacagcaaaccctcctggggcttgcccatagatgctgttcagtgggatatctgcaatctgccattgagaactggctctgtggatattattgtaacagatttgccatttggaaaaaggatgggatccaagaagagaaactggaacctttatccagcttgcctacgggagatgagccgtgtctgcacacctaccacaggccgagctgtactacttactcaagacacaaaatgctttaccaaggcgttatctggaatgcgacacgtatggcgaaaggtggatacagtctgggtgaacgttggtggtcttcgtgctgcagtttacgttctgatacgtacacctcaagcttttgttcatccttcagaacaagacggagaaagaggaactctttggcaatgcaaagaatgaagatgactaatagtacttgtacttcccaccactggaaatgttagcataaaagaacttggagaggaaaaaagtattaacaaaactgcagtctgcactctttaaacctgtttaaggctcttcatcctggttagcaaaaggtgtgaatgtaatgtgatggaatttaaaagttttatgagaccagg

SEQ ID NO: 7247 - DNA, 2835 bp, Homo sapiens
gcggcgcttcctagttcggctggttcttctgtcgccggcttcagcagcccgcgcccgggcaggaatagaagatgaacaaacccataacaccatcaacatatgtgcgctgcctcaatgttggactaattaggaagctgtcagattttattgatcctcaagaaggatggaagaagttagctgtagctattaaaaaaccatctggtgatgatagatacaatcagtttcacataaggagatttgaagcattacttcaaactggaaaaagtcccacttctgaattactgtttgactggggcaccacaaattgcacagttggtgatcttgtggatcttttgatccaaaatgaattttttgctcctgcgagtcttttgctcccagatgctgttcccaaaactgctaatacactaccttctaaagaagctataacagttcagcaaaaacagatgcctttctgtgacaaagacaggacattgatgacacctgtgcagaatcttgaacaaagctatatgccacctgactcctcaagtccagaaaataaaagtttagaagttagtgatacacgttttcacagtttttcattttatgaattgaagaatgtcacaaataactttgatgaacgacccatttctgttggtggtaataaaatgggagagggaggatttggagttgtatataaaggctacgtaaataacacaactgtggcagtgaagaagcttgcagcaatggttgacattactactgaagaactgaaacagcagtttgatcaagaaataaaagtaatggcaaagtgtcaacatgaaaacttagtagaactacttggtttctcaagtgatggagatgacctctgcttagtatatgtttacatgcctaatggttcattgctagacagactctcttgcttggatggtactccaccactttcttggcacatgagatgcaagattgctcagggtgcagctaatggcatcaattttctacatgaaaatcatcatattcatagagatattaaaagtgcaaatatcttactggatgaagcttttactgctaaaatatctgactttggccttgcacgggcttctgagaagtttgcccagacagtcatgactagcagaattgtgggaacaacagcttatatggcaccagaagctttgcgtggagaaataacacccaaatctgatatttacagctttggtgtggttttactagaaataataactggacttccagctgtggatgaacaccgtgaacctcagttattgctagatattaaagaagaaattgaagatgaagaaaagacaattgaagattatattgataaaaagatgaatgatgctgattccacttcagttgaagctatgtactctgttgctagtcaatgtctgcatgaaaagaaaaataagagaccagacattaagaaggttcaacagctgctgcaagagatgacagcttcttaaaactttattggaaaagactcttgactttttatatacacctatctcaaccatttttttaactgatttttttcctaaatattcttctttacctttaacaaggcataggctgttgcaggacagtggttattaaagcatgggttgaacttccaaaatataaaaatagagccaccatatcaacacttagccctacccattagtatcacccccagttcttacagtaatccctgagaaatctccttcaagcatcaccaaacacagtttgaaaattacagggttagcaaaaagagcctgggctgtatgtagggtggaaacactctgatctgaagcccagctgactccactactaatttgctgtaaagctttggacatacacttagctgctgtgagccactaataacattgggctaatatctgctgtgcttctctgacaggtagtcatgaaaatcaaatgatgcaaaatatatacaagcactttgtaaattgtaaaatgatacaaaatttaaagtttatagagccagttacaaaatcctattagtcatatatttatagattgtgttcacagcaatcatttaaccacaaataaaatatcccttgatgatactgccataatgatatgtccattattagattatgttacatgacaaagttgaaggaatttggcagatgcagttaaggttcctaaacaactcactttgagactgttgaaagggcctgacctaatcaagtgaacccttgcaagaagaattctccttgtaagccttgaagaagtatgtgagagggccacattggctaaaacctaaaggtggcctctaggagatgagacctaccttccagttgtcagcaagcaggaaaaaaaaattgggacctcagttgcaaccacaaggaactgaattctgccaaaaatctgagtcagcttagaagagtactccaagcttcagatgataaccacagcctgggctgacacctggatttcagctttgcatgatcctcagtatgagaatctatctgttctgtgctggacttctaatatatagaactgtgagataatgggtcacattggctggatgtggtggctcatacctgtaaatcccagcactttgggaggccgaggcaggcagatcacctgaggtcaagagttcaagaccggcctggccaacatggtgaaaccccgtctctactaaaaatacaaaaattagacgagcgtggtggtggacacctgtagtcccagctacttgggaggctgaggcaggagactagctggaaccagggaggtagaggttgcagtgagctgagatcgtgccactgcactccagcctgggtgacagagtgagactccatcataaataaataaataaataaatgggtcacattaagcctttaa

SEQ ID NO: 7248 - DNA, 1438 bp, Homo sapiens
atgaaggccactatcatcctccttctgcttgcacaagtttcctgggctggaccgtttcaacagagaggcttatttgactttatgctagaagatgaggcttctgggataggcccagaagttcctgatgaccgcgacttcgagccctccctaggcccagtgtgccccttccgctgtcaatgccatcttcgagtggtccagtgttctgatttgggtcttcctccttcccttacggaattacatcttgatggcaacaaaatcagcagagttgatgcagctagcctgaaaggactgaataatttggctaagttgggattgagtttcaacagcatctctgctgttgacaatggctctctggccaacacgcctcatctgagggagcttcacttggacaacaacaagcttaccagagtacctggtgggctggcagagcataagtacatccaggttgtctaccttcataacaacaatatctctgtagttggatcaagtgacttctgcccacctggacacaacaccaaaaaggcttcttattcgggtgtgagtcttttcagcaacccggtccagtactgggagatacagccatccaccttcagatgtgtctacgtgcgctctgccattcaactcggaaactataagtaattctcaagaaagccctcatttttataacctggcaaaatcttgttaatgtcattgctaaaaaataaataaaagctagatactggaaacctaactgcaatgtggatgttttacccacatgacttattatgcataaagccaaatttccagtttaagtaattgcctacaataaaaagaaattttgcctgccattttcagaatcatcttttgaagctttctgttgatgttaactgagctactagagatattcttatttcactaaatgtaaaatttggagtaaatatatatgtcaatatttagtaaagcttttcttttttaatttccaggaaaaaataaaaagagtatgagtcttctgtaattcattgagcagttagctcatttgagataaagtcaaatgccaaacactagctctgtattaatccccatcattactggtaaagcctcatttgaatgtgtgaattcaatacaggctatgtaaaatttttactaatgtcattattttgaaaaaataaatttaaaaatacattcaaaattactattgtatacaagcttaattgttaatattccctaaacacaattttatgaagggagaagacattggtttgttgacaataacagtacatcttttcaagttctcagctatttcttctacctctccctatcttacatttgagtatggtaacttatgtcatctatgttgaatgtaagcttataaagcacaaagcatacatttcctgactggtctagagaactgatgtttcaatttacccctctgctaaataaatattaaaactatcatgtg

SEQ ID NO: 7249 - DNA, 861 bp, Homo sapiens
ataggagaaaattgacacttactgggtgggcagagcaacattgttttgacagtgaaaattaccaatttataattttttaagaaaagcatgcctagcacagaccacctgattaccaagaggaagctgaagaggagattctactagaggtttcttgagtacaggcgatcaggctgcaaaggggaactatggactccttgatctcatacaagctttaagatggactagtgaaaacattggattctttggtggtgaccccttaagaatcactgtttttggatctggtgctgggggttcatgtgtcaacctgctgactttatcccattattctgaaggtaaccgttggagcaattcaaccaaaggactttttcaacgagcaatagctcaaagtggaacagccctttccagctgggctgttagttttcaacctgcaaaatatgctagaatgttggccacaaaagttggttgcaatgtttcagatacagtagagttagtggaatgcctacagaagaagccttacaaagaacttgttgaccaagatattcaaccagctcgataccacatagcctttggacctgtgattgatggtgatgtaataccagacgacccccagatattgatggagcaaggagagtttctcaactatgatataatgttaggagtgaaccaaggggaagggttaaaatttgttgaaaatatagtagatagcgatgatggtatatcagctagtgattttgactttgctgtttcaaattttgttgataatttatatggatatcctgaaggcaaagatgttttgagagaaaccattaagttcatgtatactgactgggctgaccgtcataaccctgaaaccagaagaaa

SEQ ID NO: 7250 - DNA, 4163 bp, Homo sapiens
cacttgtgctgagctactggctgatccccaaggacatccttctggcctctccttcacacctgggtcccctagccctgcatggagtctcgctctatcacccaggctggagtgcaatggcgcgatcttggctcaccgcaacctccatctcccaggttaaagcgattctcctgcctcagtctcctgagtagctgtgattacaggcgtgcgccatcacacccagctaatttttgtattttttagtagagatggggtttcaccatgttggcctaactcctgacctcgtgatctgcccatcttggcctccgaaagtactgggattacaggtgtgagccactgcacccggcccaaacatttctttttcttttcttttgagacagagtcttgctctgttgcccgtggctggagtgaaatggtgcgattatagttcactgcagcctcaaactcctggccttaagcgatcctcccatcctggcctcccaaagtgctgggattataggcatgagccgcagcaaccactcctcacatttcttgagcatctgtgatgtatcaagccagatgctgggcactgaggttgcagaaggcattgttcctgtcttctaggagccccaggctagcagggaagacggatgtgtatagagttaaccacaataccaggcctcaacttcccgtctgtaacacaggtggaccatgctagattgtcccagcctgccctgtgcttcattagccggtcaacagatccatctcaaatacctcccatgggtactcactgattgctttaacccaaaccatggcactcttgaagactttccctcaggaagctcaaggactatgcatccttctgggtcagaactggacacacagccaccagtgctggacaatggcggcggctcagggacacactggagccctggcccctgcagagctcccagcatggttgggaagagagatgcaaaatgaccacacggcgggtgaggaggagctccctcggtgcggctgggatgagccctagacactctcaatcacccccacgatgaccccttcccagaggtcccctcagtcatctgccctgaaccaagctcttcctgatcctagaccctccaccctccctctatcttccagggcttggtgacattccaggcagaaatttctgacccttttactttggtccctccctccccagcccagtctctggtcaaactggattcctggctgttcccagaacgagctgcctttccccaccttgccacctctgcccttgttctctctgcctgaatgtcctccttcactagcctcgctgccttgcacatctctcctgagggctgtcatcccagaatgagctgcatttgtccagcctggcccaccgtctaccagaacgtcctccttcagcctgtcccactgccttgcaaaacttttctgggggacctgttcacgatgccttctgtagcatactccaagaatccggcgccccctggagttgtgccacacagcacccctttgcagtcaagctccctcagcaccaccacctccaccctggaagagttccccttccctttgaaatctcatgggactttgcacccactctggctttattggaaggctttgtatgtctccacagggtaaacacccatttactggggtgatgatgtctccaggatctagttcatgtttgtcgttggtgactggccccacccagttctgggcaagcaggctggatcccggcaggaacagagcccaccagcctaaacttccatggaggtggagaggggacaggcttctgtctctttttggctgaaggtgcatcatgtccaaggcccctcttctagccaagcagagaagctgggtgataaggatgggtgagagtgggtgatgtaccccggagtcctggcctcccggctcctcactcccctacacgtaactttatccggccaatgccgcaaagactgctggtgaggccagatgcatgagtgatcatactcacaacagtcgtgaaactgccagtgatgaaactggtaaggacaagaaatgacaataatcaaggtggggtttctcgtggacgtttccaagacttcattctcaaattctctccctcagggtccccaccctgtcctcccacctaagcctggaatgagggggcactggcctgtggggaccctggtcttcaggctcccaaacctggctgggtctggttgccccctggccttaacctgtgaacatccagctgtccctgggctgtgattcagtgtctgtctcccgggtgacctcagcatgggctttgaggaaggggagagagtagtttcttctgagactggatagtgactcagggacccggggctggggcctcaaaagtgcctttgttggcctgggctcaggaatccagagaaactggtcaggaggaggccccagtgacaaaaacccctccctctgcccccgcccctctgccagagccatataactgctcaacctgtccccgagagagagtgccctggcagctgtcggctggaaggaactggtctgctcacacttgctggcttgcgcatcaggactggctttatctcctgactcacggtgcaaaggtgcactctgcgaacgttaagtccgtccccagcgcttggaatcctacggcccccacagccggatcccctcagccttccaggtcctcaactcccgtggacgctgaacaatggcctccatggggctacaggtaatgggcatcgcgctggccgtcctgggctggctggccgtcatgctgtgctgcgcgctgcccatgtggcgcgtgacggccttcatcggcagcaacattgtcacctcgcagaccatctgggagggcctatggatgaactgcgtggtgcagagcaccggccagatgcagtgcaaggtgtacgactcgctgctggcactgccgcaggacctgcaggcggcccgcgccctcgtcatcatcagcatcatcgtggctgctctgggcgtgctgctgtccgtggtggggggcaagtgtaccaactgcctggaggatgaaagcgccaaggccaagaccatgatcgtggcgggcgtggtgttcctgttggccggccttatggtgatagtgccggtgtcctggacggcccacaacatcatccaagacttctacaatccgctggtggcctccgggcagaagcgggagatgggtgcctcgctctacgtcggctgggccgcctccggcctgctgctccttggcggggggctgctttgctgcaactgtccaccccgcacagacaagccttactccgccaagtattctgctgcccgctctgctgctgccagcaactacgtgtaaggtgccacggctccactctgttcctctctgctttgttcttccctggactgagctcagcgcaggctgtgaccccaggagggccctgccacgggccactggctgctggggactggggactgggcagagactgagccaggcaggaaggcagcagccttcagcctctctggcccactcggacaacttcccaaggccgcctcctgctagcaagaacagagtccaccctcctctggatattggggagggacggaagtgacagggtgtggtggtggagtggggagctggcttctgctggccaggatagcttaaccctgactttgggatctgcctgcatcggcgttggccactgtccccatttacattttccccactctgtctgcctgcatctcctctgttccgggtaggccttgatatcacctctgggactgtgccttgctcaccgaaacccgcgcccaggagtatggctgaggccttgcccacccacctgcctgggaagtgcagagtggatggacgggtttagaggggaggggcgaaggtgctgtaaacaggtttgggcagtggtgggggagggggccagagaggcggctcaggttgcccagctctgtggcctcaggactctctgcctcacccgcttcagcccagggcccctggagactgatcccctctgagtcctctgccccttccaaggacactaatgagcctgggagggtggcagggaggaggggacagcttcacccttggaagtcctggggtttttcctcttccttctttgtggtttctgttttgtaatttaagaagagctattcatcactgtaattattattattttctacaataaatgggacctgtgcacagg

SEQ ID NO: 7251 - DNA, 667 bp, Homo sapiens
ggcactgccttgcgtgtgtgcacacgtgtgaggatgtcagcgcctgtgtggccgcgggactcaaggctggcctggctcaagtgaacagcacgtccaggaggcgacctcgtccgcgggtttgcattctggggtggacgagctgggggttcggtccgagcccggtgggaggctcccggagcgcagcctgggcccagcccaccccgcgccggcggccatggcaggcaccctggacctggacaagggctgcacggtggaggagctgctccgcgggtgcatcgaagccttcgatgactccgggaaggtgcgggacccgcagctggtgcgcatgttcctcatgatgcacccctggtacatcccctcctctcagctggcggccaagctgctccacatctaccaacaatcccggaaggacaactccaattccctgcaggtgaaaacgtgccacctggtcaggtactggatctccgccttcccagcggagtttgacttgaacccggagttggctgagcagatcaaggagctgaaggctctgctagaccaagaagggaaccgacggcacagcagcctaatcgacatagacagcgtgtgcgtggggggagcacagagggctgggggggcactcagtatcctataccatctgtgcttaataaatgtctgttgaactgaa

SEQ ID NO: 7252 - DNA, 7497 bp, Homo sapiens
gcggcagaggcggtgtccaggcttccgggcgggtagtccttcggctccggagccgcgactgcgctcgcctaggtggtgggcggggagggaaggaagggagcgggcgcaaggcggcggcggcggctgcgggtgaggaacttgttgcgcccgcggctgcgcggtgcccctccctccgctccagttcgtcggggcgggcgcggcggcggcggcgaaggaggagcgcggccggggcgatgcggcgctacctgcgcgtcgtggtgctgtgtgtggcctgcggcttctgctcgctcctttacgctttcagccagctcgccgtgtccctggaagaaggaacgggcggcggtggcgggaagccgcaggccgcggtggcttcctggctcgcgggcggcggacgcggcgccgtgagaggcgccggcgtcgcgggccccgcagcgcatcccggcgtgtcggacaggtgtaaagatttctctctgtgttactggaatccctattggatgctgccctctgatgtttgtggaatgaactgcttttgggaagcggcttttaggtacagtctgaaaatacagcctgttgagaaaatgcatctagctgtagttgcctgtggtgaaagactggaagaaactatgaccatgttgaagtcagctatcattttcagcatcaaacctcttcaattccatatttttgctgaagatcagctacatcatagctttaaaggcagacttgacaactggtcatttctacaaacatttaattatacgttataccccataacctttccaagtgagaatgcagcagagtggaaaaaactctttaaaccatgtgcttcgcagagattgttcttgccgttaatcctgaaagaagttgactcactattgtatgtcgacactgatatcctttttttacgaccagttgatgatatttggtctttactaaagaaatttaattccacacaaattgctgcaatggcaccagaacatgaggaacctcgaataggatggtataatcgctttgctaggcatccatattatggaaaaactggagtaaactctggagttatgttgatgaacatgactcgaatgagaaggaagtatttcaagaatgatatgacaactgtacgactacaatggggagatatacttatgccattgcttaaaaaatacaaactaaacatcacatggggtgatcaagatctattgaatatcgtgttttttcataatccagaaagcctttttgtttttccgtgtcaatggaattatcgaccagatcattgtatatatggaagcaattgccaagaagcagaagaaggaggaatctttattcttcatgggaacagaggtgtttaccatgacgataagcaaccagcatttagagctgtttatgaagcactgagaaattgttcttttgaagatgacaacatccgttccttattaaaacctttagaactggaactacaaaaaacagtgcatacatactgtggaaaaatttacaaaatatttatcaaacaactagcaaaaagtgtaagagatcgttatgccagatcaccaaaggaaaagtgattcttggtgactgcttaatcaaatggatgaaaacaaagaatcagaagataagtgtgaaggaatcgtcttggatgaagtattcaggaaggaattactcatctccagaataattttttttttcctaaagaagttaagtaagcagtattttcaggtaatgaagaataagttaaaatcttgggcctcaacattgaacattttttatctctgatgttttgtaatgttacttgctatcattccagtattgatgaaaatactattgaatgggtttaacctgcagacttctgttgactcatactctcaagagtggtaggggtgtgtagatggagaaaatgtacctcaaacagtgccaacactcaagactgtgagtagagcaataattttatgtcagcactaacctcactttaaaagtgtgagaaaaaagtttgtttacaggagcagaaacaggtctgttgtttctgaagaaatgtgatgtaactgatgtaaccattgacaatctatgtgtgcctttatacatttcatctctgttttaaaatatttttatgacaatcatgtttaaaattatttttagattacaagtaagctgcatgttaaaaattgagctgtgtaaggtagaggaaaaatagtgaaaactttgggattttaatctgtgtgtgcgtgtttgtgtgtgagagagagtgagaaatgtagtgtttcattttgtatgcattaaactgtcttgccaaaactcagatctaagattgttaaatagatatttggggaatttttttttaatcactttaaatgaaaaacgtcagctttactgggcattctggaagcaaaatatattatgctgatggtaaagtgagaaccttaagagtatactcatgatggtggaaagtgtgatggaccaaaatgcataagctatatacttcctgtgagtagtaattttagttacaatggagtagaaaaatatggtccatttaaacttgtcttctacctcataacggccttgcaagatacttttgaagaagcaaatgtctagagccttactttaagtaagttaaacaacttaagtggatgatttggaataagattgttacatccagctgtagaaaatgtggttttaattgggttgatgtgcatttttgaatatcacctaagacagttaatttttttaaatcttgagaaattacttctttggcattcttgacctgttagctaatataactatagattctgaatacttagcatatactatgctggggcacatatcttattttaccaacaatatgattatctatatggttatcttctttttctccctgatattttaatgctcaagtagaaaatggaaaatcatgaaggaaaaatacaacctgtgaaaattgtggcagttagctttgtgaagacacagtgacctctgtggagacatggaatatgcagaaagagatggttagtacagttgttctgtcgtctgcagttcagtcagggacaaattgagagaggaaagtttaagcagggtgcattagaagttgataaccagtccagcattcttagaacagatgggtttagagaacacgagttgtagttccttggcagaatgccatggtgaatataagaaactgtgaaattgagcttactgagtagaaaatgagaatactaaaaatgtgaagtttggagggtatgtattagatcatttctaatggtcctcaaataatgatcattgcctgcctgactatgtaagattcttgttgggagcttaagaatagattcctgagctaggcctttggagactctggcatgctgtgtctaggagggagtctgtaaaacaatttttaatgaagaaatttaaaaattacacaaaactagaatagtgcattggtactcaacatccagatctgacacttatcactatcttaccatgtttgcttcatttgtcatttttttgtttgcttaagtatcttaaaatcccatacattgtgttatttcactgctgtgaacactttgggtagataccacgatatcacacctaacagaggcagcagcagtccttcggcttcatctcatagccagtccttaagcaaatttccctgattatctcaaaaatcatcttctagttggtttgttagaatcaacagaatataagtcacatgatgatttcgtttttaacaatcacctcagatgactttgatgttagctactttgagaaccactggaaattattttgccaacttgaaagttcaagttaggataccacaattcttggcacgtttggtggattataaatgtgattttgaaatattagaggaagcatttggggttaatgacaggatatgaatttatattagtaagtttgataagataaaatttcctcagtgaacggagaatctcagccccatgggctctaattgattgggacttgtgtagagcgtggtcacagtttaatccaactggactgtatgctgtggtctcactcatgttgtggcttatttacactgtcacacacactacattgtggatcagttggaaggttcttcatctggtttatttagacctgacctaattgatcattttaccataaattgaattatagtgaaaactgtcttttgggtactgtttctacctaaaattaaaggtatcacaaaatatgtataataatttttaaatgaattttctgaatttatctttagacaaggtaattcttttgaattctaaagaaatgcagttcttggagttgatgagaggttaaattatagatggacaacttagagaacgtattccatcttcatataaatggtctttcataaaacatagtgtatctatgcagtttatataaactacatgatttattatttgagtctatgtattctgacctcagaactatctctgggctacagtattaccaaagtgggatgcctttaaaatgcagtcaaacttcatttgtatgaagtagaaaagaacttgggaaacctttaaaaatatatattgtgatttatgctttaagaaaatgcatacttttttctaatgaagagtagttcataatatataagggttttaaggccctgaaataacattagtgcttactcattgctctctcatcttgcctccagtcagatgttattggtatagtgaaaagaagaccagattttgaactagatctggattctctttttagtaactcaggcatgttatttacccttctctgtgccttaggtttttaagtacaatcagtgtacccttcaaacctcacaagatgaaactcagaagagataatggatttggaagcattttgcgtggcttatattatgccacgccagtgttactgttgaagttctgttttgttcgttgttttctgtacagagcgttcagtttactcaggctgaatgttttctgacatatatctccagtatgaatttgtttatgtaaggaagagtttttcaggaagagaaagtagagaagaaaagaatgatgtaactaaatcaaaaaagaaggaaaagagaggaagtgagaaaaggggtgaggaaagagaaaggagtaagaatggggatggcaaagggcagagtaagagaaaagatggaatgagtgtatggaaaattgagaagtagagatggagagaaatggtgtggaaacatttactttttgagttgtagccctcacactacatcagtttgcttgcctgggctctctggggtcaggaaaggtgctgacttccatggaatggggcagcagggcctgctgtatttggtttgttagtactagagttgtttcccaatcaccctactcactgatcatttagtgccaattcaacattttatgtcttttttttttagtggatcccagtttgtgagctaggacctgtggaaatacaagtatcttcctttttaactttattgttttagccatcccaagtgttagactgcaagactaactacatattccccagtggaggttggaagtggaggggactgcttcattaggtctgaagggggccaaggaatgtgttgcagcagttttcgcagatgatactgacgagaggccaggtttgggaatcactgccctgccttggatggcaaattaagcaataaattacacctatttattcctcagttgggatactttcagttgaaccattctgagtagatttaagagaacaaaagacagcagaaataccttaaaagatattattggctgtcttatttttcagatatttgtatttaataaataccttagtagtagtcagaacctctttgagatgtttttagaaagaccactgatttgttttttaaaataatttttttggttccttagagtagagaagaaaagtaggggtgcaatatgtcaggtgtggggccagttatccatttattaaatgcaatttcaagtgtcttaaaaacaataattgccttattgcattttaatatttaataaagtagattaaataaagatttgtattataacagttattcttttatccattgccaaagcaacccttttttgcctattaaaatctggctaaactgttctgatgttgtttcttaattcattaaacatgaaactaggttttacaaactaaattatataaagacagaagtctaaaaatggtaccagaaaatttttttttaaaaaattaatgtgttattcaaatatccagcaattaaagactcatgagaaaaacagaatagcatattagatgtaacagtttaaaatggattgcaaatcaatgtcagacttaaatagaaaatatttattatcacctcatttctaccaataatttcagatgtttaatgggactttgaaaagataggaaaaaatagaaatgaaaatttatctcacctttaatactgtgaatactatttggagggtccctggtcagacatttaaatatcaaacttaagaactgacatggagcctttgattagtttatatacaggatctgaatatttacacacatagcacactatagcaacctcttgtaaaaaatcatgaagatagaattcaacagtgtatattctattaaaaagtaaattggctgggtgtggtggctcatgcatgtaatcccagcactttgggaggccgaggcaggaggatcgcttgagcccaagagtttgagaccagcctaggtgacaaagtgagaccccatctctacaaaaaaattaaaaaattatccagatgtggtggtgtttgcctgcggtcctagctacacaggaagttgaggcaggaggattgcttgagtgcaagagtttgaggctgcagagagccaagattgcaccattgcactccagcctgggtgacagagcgagaccctgtctcaaaaaataaaggaaattggctttgactatgaaaaacagccattttcaacctttttataaaacctcttcagggaatattggaatattatttttgtcaggcaaaaataatccagggcttgagcattgctgtagaatatgttatctgttcaaaacttagcagagcacgcatgcatcacatgcattgtcatcagtatttgagagctgaaccaatggtttttgatggttgccgtaacagaagatctgtgaagaggatggtggtttgcacctgttcctgaagtcaaactggaaaaggttgcaggtatttcaattttctcaatcattttgcataaatgtattaatattttgagtagtaatagttctaaacctgcaggaaggcatcattgtatactgtggtatgtagagaatactactcttacactgctctttatcttaaaatgttttggtatactgtgaatattttcctctaagtatttggtgtattttgacagttattaaaggagaatataaaattaaagattctggtctaaactaagaataatggaaagttgcttcgtcctgccttagaggagttttcagttcatcctcttcttgagaaactatgtgttgctgttactaaataaacatttactcaataaacgttttatttcctcaaa

SEQ ID NO: 7253 - DNA, 598 bp, Homo sapiens
ggcggggagcggggccgcggcgtggagagcgggcgggagccgcagccgcagcgaggccggcgggcgggagcgcacggaggtggggtcggccaggccggtgcgggctccttgcggcaggtcccaagaatgagaaaattgaggctcccagaggccaagtgattctcaaggtcacacgaggaagcggtagagccaggcggggacggctctgggtggctcttaggaaaagtccgcctgagaactccgtacaggagctcccctgtcctccagcctgggggagggttcggtccgagcccggtgggaggctcccggagcgcagcctgggcccagcccaccccgcgccggcggccatggcaggcaccctggacctggacaagggctgcacggtggaggagctgctccgcgggtgcatcgaagccttcgatgactccgggaaggtgcgggacccgcagctggtgcgcatgttcctcatgatgcacccctggtacatcccctcctctcagctggcggccaagctgctccacatctaccaacaatcccggaaggacaactccaattccctgcaggtgaaaacgtgccacctggtcaggtactggatctc

SEQ ID NO: 7254 - DNA, 2818 bp, Homo sapiens
aatccggtgccggcaagcggctggcgatgctggaggttcgctagccgaagcggctgcatctggcgccgcgtctgccccgcgtgctcggagcggattctgcccgccgtccccggagccctcggcgccccgctgagcccgcgatcacttcctccctgtgaccaaccggcgctgcaggttagagcctggcaatgccgtttgggtgtgtgactctgggcgacaagaagaactataaccagccatcggaggtgactgacagatatgatttgggacaggtcatcaagactgaggagttttgtgaaatcttccgggccaaggacaagacgacaggcaagctgcacacctgcaagaagttccagaagcgggacggccgcaaggtgcggaaagctgccaagaacgagataggcatcctcaagatggtgaagcatcccaacatcctacagctggtggatgtgtttgtgacccgcaaggagtactttatcttcctggagctggccacggggagggaggtgtttgactggatcctggaccagggctactactcggagcgagacacaagcaacgtggtacggcaagtcctggaggccgtggcctatttgcactcactcaagatcgtgcacaggaatctcaagctggagaacctggtttactacaaccggctgaagaactcgaagattgtcatcagtgacttccatctggctaagctagaaaatggcctcatcaaggagccctgtgggacccccgagtatctggccccagaggtggtaggccggcagcggtatggacgccctgtggactgctgggccattggagtcatcatgtacatcctgctttcaggcaatccacctttctatgaggaggtggaagaagatgattatgagaaccatgataagaatctcttccgcaagatcctggctggtgactatgagtttgactctccatattgggatgatatttcgcaggcagccaaagacctggtcacaaggctgatggaggtggagcaagaccagcggatcactgcagaagaggccatctcccatgagtggatttctggcaatgctgcttctgataagaacatcaaggatggtgtctgtgcccagattgaaaagaactttgccagggccaagtggaagaccgtagtgccaccccagccacagatggaagtgccaccccagccactgatggcagtgtcaccccagccaccgatggaagcatcactccagccactgatgggagtgtcaccccagccactgacaggagcgctactccagccactgatgggagagccacaccagccacagaagagagcactgtgcccaccacccaaagcagtgccatgctggccaccaaggcagctgccacccctgagccggctatggcccagccggacagcacagccccagagggcgccacaggccaggctccaccctctagtaaaggggaagaggctgctggttatgcccaggagtctcaaagggaggaggccagctgagtaggcagcctggtgagggggggcaggggatgggcaggagggtgggagagtggatgaggggcttctcactgtacatagagtcactggcatgatgccctcgctcccccatgcccccacatcccagtggggcataactaggggtcacgggagagcagtctcgtctcctgtgtgtatgtgtgtgagtggtgggcaggccagtggcagggccggccccagcccctgcatggattccttgtggcttttctgtcttttgctagcttcaccagtttctgttccttgtgggatgctgctctagggatactcagggggctcctgctctccttccccttcccttcttgcctcaccattcccctaggcaggccctgcaggtcccacactctcccaggccctaaacttgggcggccttgccctgagagctggtcctccagcgaggccctgtcagcggtcttaggctcctgcacatgaaggtgtgtgcctgtggtgtgtgggctgctctaggagcagatacaggctggtatagaggatgcagaaaggtagggcagtatgtttaagtccagacttggcacatggctagggatactgctcactagctgtggaggtcctcaggagtggagagaatgagtaggagggcagaagcttccatttttgtccttcctaagaccctgttatttgtgttatttcctgcctttccgagtcctgcagtgggctgccctgtaccctgaacctcatgagcctctaagggaaaggaggaacaattaggacgtggcaatgagacctggcagggcagagtacaagcccagcacccagtgtcccagccttactgggtccttaccctgggccaaacagggagggctgatacctccttgctcttcctagatgcccacctcctacaatctcagcccacaagtcctctccaccctagggggcttgctgcatggcaataactcataatctgatttggaggtttgccctttacaggggcagattttctgctcagttcaacaatgaaatgaagaggaactccctctttctacagctcacttctatcagaggcccaggtgcctcagagccacattgagttgctttttctgggatgaggaagtagggttaaactccccagtttcctgagggaggctcctgacaggtgccctttgtcagaccctaccacagcctggataggcagccacattggtcctcgcccttgctcggcactccgtggtggtcctgcccttctccctgcatgcctgtgggtctgctctggtgtgtgaaggtcggtgggttaactgtgtgcctactgaacctggcaaataaacatcaccctgcaaagcc

SEQ ID NO: 7255 - DNA, 2447 bp, Homo sapiens
gcatggaggacacagagagagagagtgctgtgtattccttccccgctactgtcctgtcctcagctaacttgctctgggacagcttccccagggctacagatactgcactcagctgactgtcctttcttctgggcccctggtcccagagcagagctgacaaaggagattcctgagagagcaccttcttatcacagaaagtgctgagccaagagctcctagctgccccttttgcagatgtgaagggccagtgaaccttggacccagatggttgcttaatactcctttccccctccctcactccttcctttgcgggctgcctcacctcctccacccttcttgcttaaatccataggcatttgtctggccttcccttttactgctggctgggaaggaggagcatcagaccacagatcctggaaggcacttctctccctgactgctgctcacactgccgtgagaacctgcttatatccaggaccaaggaggcaatgccaggaagctggtgaagggtttcctctcctccaccatggttgacagcactgagtatgaagtggcctcccagcctgaggtggaaacctcccctttgggtgatggggccagcccagggccggagcaggtgaagctgaagaaggagatctcactgcttaacggcgtgtgcctgattgtggggaacatgatcggctcgggcatctttgtttcccccaagggtgtgctcatatacagtgcctcctttggtctctctctggtcatctgggctgtcgggggcctcttctccgtctttggggccctttgttatgcggaactgggcaccaccattaagaaatctggggccagctatgcctatatcctggaggcctttggaggattccttgctttcatcagactctggacctccctgctcatcattgagcccaccagccaggccatcattgccatcacctttgccaactacatggtacagcctctcttcccgagctgcttcgccccttatgctgccagccgcctgctggctgctgcctgcatttgtctcttaaccttcattaactgtgcctatgtcaaatggggaaccctggtacaagatattttcacctatgctaaagtattggcactgatcgcggtcatcgttgcaggcattgttagacttggccagggagcctctactcattttgagaattcctttgagggttcatcatttgcagtgggtgacattgccctggcactgtactcagctctgttctcctactcaggctgggacaccctcaactatgtcactgaagagatcaagaatcctgagaggaacctgcccctctccattggcatctccatgcccattgtcaccatcatctatatcttgaccaatgtggcctattatactgtgctagacatgagagacatcttggccagtgatgctgttgctgtgacttttgcagatcagatatttggaatatttaactggataattccactgtcagttgcattatcctgttttggtggcctcaatgcctccattgtggctgcttctaggcttttctttgtgggctcaagagaaggccatctccctgatgccatctgcatgatccatgttgagcggttcacaccagtgccttctctgctcttcaatggtatcatggcattgatctacttgtgcgtggaagacatcttccagctcattaactactacagcttcagctactggttctttgtggggctttctattgtgggtcagctttatctgcgctggaaggagcctgatcgacctcgtcccctcaagctcagcgttttcttcccgattgtcttctgcctctgcaccatcttcctggtggctgttccactttacagtgatactatcaactccctcatcggcattgccattgccctctcaggcctgcccttttacttcctcatcatcagagtgccagaacataagcgaccgctttacctccgaaggatcgtggggtctgccacaaggtacctccaggtcctgtgtatgtcagttgctgcagaaatggatttggaagatggaggagagatgcccaagcaacgggatcccaaatctaactaaacaccatctggaatcctgatgtggaaagcaggggtttctggtctactggctagagctaaggaagttgaaaaggaaagctcacttctttggaggcacctgtccagaagcctggcctaggcagcttcaacctttgaacttactttttgaaatgaaaagtaatttatttgttttgctacatactgttccagacttttaaaggggacaatgaaggtgactgtggggaggagcatgtcaggtttgggcttggttgttttagaagcacctgggtgtgcctacctactcctcttttcttttaaaagggcccacaatgctccaatttcctgtctcctttagagagacatgaaactatcacaggtgctggatgacaataaaagtttatgttcct

SEQ ID NO: 7256 - DNA, 1351 bp, Homo sapiens; identical to SEQ ID NO: 6333

SEQ ID NO: 7257 - DNA, 596 bp, Homo sapiens
ggaatgaaagacccggctgtgtctttcaggtctgatctcagagctgaagctggctgtgccctggggccacatcgcagccaaagcctggggctccctgcagggccctccagttctctgcctgcacggctggctggacaatgccagctccttcgacagactcatccctcttctcccgcaagacttttattacgttgccatggatttcggaggtcatgggctctcgtcccattacagcccaggtgtcccatattacctccagacttttgtgagtgagatccgaagagttgtggcagccttgaaatggaatcgattctccattctgggccacagcttcggtgagtacagtggccaggagctgaccgggcccggagtagggctgggagggaaggataggagctgctgccccacccctttcccctgcacttatgagatctgcaaagagagatgagagggtcagtcagaggttgaccactgtaccctctgacctcaggcaactgccgcaagggacacagggatgagggaaatgtggtcttttgagtggtcaggtctgatgaaggggacatcatggcccagatgctgagcccccagccacccat

SEQ ID NO: 7258 - DNA, 1124 bp, Homo sapiens
gctttcacttcctcctccgagagcggacagatctctgggtgctgggcggtcatggcgctactagatgtatgcggagccccccgagggcagcggccggaatcggctctcccggttgcgggaagcgggcgtcgctcggacccaggacactacagtttctctatgcgatctccagagctcgctttaccccggggaatgaagcccacagaattcttccagtccctgggtggggacggagaaaggaacgttcagattgagatggcccatggcaccaccacgctcgccttcaagttccagcatggagtgattgcagcagtggattctcgggcctcagctgggtcctacattagtgccttacgggtgaacaaggtgattgagattaacccttacctgcttggcaccatgtctggctgtgcagcagactgtcagtactgggagcgcctgctggccaaggaatgcaggctgtactatctgcgaaatggagaacgtatttcagtgtcggcagcctccaagctgctgtccaacatgatgtgccagtaccggggcatgggcctctctatgggcagtatgatctgtggctgggataagaagggtcctggactctactacgtggatgaacatgggactcggctctcaggaaatatgttctccacgggtagtgggaacacttatgcctacggggtcatggacagtggctatcggcctaatcttagccctgaagaggcctatgaccttggccgcagggctattgcttatgccactcacagagacagctattctggaggcgttgtcaatatgtaccacatgaaggaagatggttgggtgaaagtagaaagtacagatgtcagtgacctgctgcaccagtaccgggaagccaatcaataatggtggtggtggcagctgggcaggtctcctctgggaggtcttggccgactcagggacctaagccacgttaagtccaaggagaagaagaggcctagcctgagccaaagagagagtacgggctcagcagccagaggaggccggtgaagtgcatcttctgcgtgttctctatttgaacaagcatttcccccagggaagtttctgggtgccccactaagtagaataaagaaaaacggttataaata

SEQ ID NO: 7259 - DNA, 6821 bp, Homo sapiens
aatcgccggcagcctatgacatcagacaggaacgcctgggatgccgcgctgctcctggccaacctccgaggaggaggagggtcccgccggctaagagttaattagccccgcacggcgaggggggaggcgccagttttctggggacactggctgccactgtactcctacccaggggagctcacggagagttggatgaattctgggttgttagctgcggtcagctgggctcccgggagcctgttgctggtggagaacagggggcgcctggccaagggaccagcggcttgctgagactcaacatgacactcctggggtctgagcattccttgctgattaggagcaagttcagatcagttttacagttaagacttcaacaaagaaggacccaggaacaactggctaaccaaggcataataccaccactgaaacgtccagctgaattccatgagcaaagaaaacatttggatagtgacaaggctaaaaattccctgaagcgcaaagccagaaacaggtgcaacagtgccgacttggttaatatgcacatactccaagcttccactgcagagaggtccattccaactgctcagatgaagctgaaaagagcccgactcgccgatgatctcaatgaaaaaattgctctacgaccagggccactggagctggtggaaaaaaacattcttcctgtggattctgctgtgaaagaggccataaaaggtaaccaggtgagtttctccaaatccacggatgcttttgcctttgaagaggacagcagcagcgatgggctttctccggatcagactcgaagtgaagacccccaaaactcagcgggatccccgccagacgctaaagcctcagataccccttcgacaggttctctggggacaaaccaggatcttgcttctggctcagaaaatgacagaaatgactcagcctcacagcccagccaccagtcagatgcggggaagcaggggcttggcccccccagcacccccatagccgtgcatgctgctgtaaagtccaaatccttgggtgacagtaagaaccgccacaaaaagcccaaggaccccaagccaaaggtgaagaagcttaaatatcaccagtacattcccccagaccagaaggcagagaagtcccctccacctatggactcagcctacgctcggctgctccagcaacagcagctgttcctgcagctccaaatcctcagccagcagcagcagcagcagcaacaccgattcagctacctagggatgcaccaagctcagcttaaggaaccaaatgaacagatggtcagaaatccaaactcttcttcaacgccactgagcaatacccccttgtctcctgtcaaaaacagtttttctggacaaactggtgtctcttctttcaaaccaggcccactcccacctaacctggatgatctgaaggtctctgaattaagacaacagcttcgaattcggggcttgcctgtgtcaggcaccaaaacggctctcatggaccggcttcgacccttccaggactgctctggcaacccagtgccgaactttggggatataacgactgtcacttttcctgtcacacccaacacgctgcccaattaccagtcttcctcttctaccagtgccctgtccaacggcttctaccactttggcagcaccagctccagccccccgatctccccagcctcctctgacctgtcagtcgctgggtccctgccggacaccttcaatgatgcctccccctccttcggcctgcacccgtccccagtccacgtgtgcacggaggaaagtctcatgagcagcctgaatgggggctctgttccttctgagctggatgggctggactccgagaaggacaagatgctggtggagaagcagaaggtgatcaatgaactcacctggaaactccagcaagagcagaggcaggtggaggagctgaggatgcagcttcagaagcagaaaaggaataactgttcagagaagaagccgctgcctttcctggctgcctccatcaagcaggaagaggctgtctccagctgtccttttgcatcccaagtacctgtgaaaagacaaagcagcagctcagagtgtcacccaccggcttgtgaagctgctcaactccagcctcttggaaatgctcattgtgtggagtcctcagatcaaaccaatgtactttcttccacatttctcagcccccagtgttcccctcagcattcaccgctgggggctgtgaaaagcccacagcacatcagtttgcccccatcacccaacaaccctcactttctgccctcatcctccggggcccagggagaagggcacagggtctcctcgcccatcagcagccaggtgtgcactgcacagaactcaggagcacacgatggccatcctccaagcttctctccccattcttccagcctccacccgcccttctctggagcccaagcagacagcagtcatggtgccgggggaaacccttgtcccaaaagcccatgtgtacagcaaaagcaaatgacccggagtcagcagatggatgaactcctggacgtgcttattgaaagcggagaaatgccagcagacgctagagaggatcactcatgtcttcaaaaagtcccaaagatacccagatcttcccgaagtccaactgctgtcctcaccaagccctcggcttcctttgaacaagcctcttcaggcagccagatcccctttgatccctatgccaccgacagtgatgagcatcttgaagtcttattaaattcccagagccccctaggaaagatgagtgatgtcacccttctaaaaattgggagcgaagagcctcactttgatgggataatggatggattctctgggaaggctgcagaagacctcttcaatgcacatgagatcttgccaggccccctctctccaatgcagacacagttttcaccctcttctgtggacagcaatgggctgcagttaagcttcactgaatctccctgggaaaccatggagtggctggacctcactccgccaaattccacaccaggctttagcgccctcaccaccagcagccccagcatcttcaacatcgatttcctggatgtcactgatctcaatttgaattcttccatggaccttcacttgcagcagtggtagaatgcccaatgcaccagtgctatggaagaccaatggagttccatgggggaaagcacacagccatacatactttactgtccaaaaacagaagaagaagaagagaattaaaaagaagcaatgatttctgtgccaatgaacaagaacaaaagtcatttttagaaatacatatactgtaatatttaccaacagtcagtaactgttaatgatttcaacaatgcattaaaagaatgtgctttctcagattaaggatgccaaaaaagatatttcactgccttttcaaagaccagtatattttctagcccataatttttctcaggcattgttggggcataagctcacactgtaagcttttctcatgaattcactagacataacgtggaaggaaaacgtagtcttttgggagtacagggaagccagcccctcaaagcttatggaagacatacctgcaatggaagctgttgcccaatgtctccattactatctttcaaaagagaagccagacccagcttcagatcaaaagttcttgagacagaggaacaaaaccaatcgatttccagggaagctaatcaactctcttttccctctaccacaaaactgccctgctggagtggttctgaacctgtacccaggactcgatgtggtcactaataacaattaacctgaactgagtccacagaactccactcggaactttcttcttttttaactagtggcccaatcattcccaccatctctgtgctgataagtacgtgtcctagatgagaaccctgaagaatgcagaccttcttcccccgaaggagatgccacaagctctccaacacagccccctttagttccaaagactagagatgaccacattggtagaagtatatctcgaggcacaggaagggagccccaccagggataattcagacaggactagagaataacatcatttcacataccctgggataaacaccctgggttcctatagaaggactattacttatgggagtccaacttctccttttgttttgttattatcagtttatctttctcccactccacttttccttcaaggtaccaatcctttcctgttcctcgtttggccatctttctttttctgcctccacattgggaggggaggacttctcagttctaacaagctgccatactcctaagaaagccatttttgaaaaatttaacaatccaggttcttctggagaactcattctccacacgcacagtttgctgcaaaaggaagttgcaagaatttcttgaggaagaaactggtgacttggtccatcagtcacgaagttctttctattctcgtttagttttcaagaaattattggtttgtgttgctctggggaaattggaaatcattacattgtaaagacaaatatggatgatatttacaagagagaatttcagatctgggtttttgaaagaaaacagaattgcgcattgaaaacgatggaaggaaaaagacaatggtctaatgtgcattcctcattacctctcgtggctttggctgggagttggaaaaagctaaaatttcagaacagtctctgtaaggctctctgtggctccagttcaccattttatattgttgcatgctgtagaaaggagctattgctgttgttttgtttttttatttaaatcactaaggcactgtttttatcttttgtaaaaaaaaaaaaaaagttgttcactgtgcacttatagaaaaaataatcaaaaatgttgggattttagaagctctctttttgataaaccaaagatttagaagtcattccattgttaacttgtaaaaatgtgtgaacacagagagtttttggtgattgctactctgaaagctgccagatcttattctgggggtgggatgtggaggaatacacatacacacacaaacatacatgtatgtataatagatatatacatatgtgtatattatatctgtgtgtgcatgtatctccaaaagcggcgttacagagttctacaccaaaagcctttaacccttaatctgctgtgaatgatacctggcctttctcactatgaatttctgattaaccaaccagactacacgttgcctctctgtgtatgactaacggctccaacccgatgactcacagctacttgcttatcgtgaacaagctcatcttggcaatgaatatggatgtgaaaagacagaacagcttcaccattagtagctggaaatggtatcacagtctcttatagaggaatatgaaaggaacaagaaaatcattttacattccttttatctgtattgtgctttaaaagatccacatggtaaattttttattttgcttttatgtcagtcatcagaaccaaaaaaatccagaagaaaaaattgccagtgtttcctttgaagatgaagctactggggaagaaaaccttattaatacactccacacatttgttcattcctcagctgttggtgttttcttggggtcttgacaaagcttgctggtcagtgcacttttcaggtgtcacgttttgctgtttgtatgttttttcttccccttacttcctttggaaaacaaactcacacagtgcccctactctgagacctgggactgagtgttaattattttttccttgggtatttctatctgagagactagacctagttaggaggcctctgtacttctccagattgtacctttttatggggatctttgaggctatgacccaggactgatagatatgccttacggaagacaaaagataaaatggttcctatatcctaatgcaaaccaacacagttaaaagagcagatctctggataactgctctcaacctgcttctacagtctccacaaaccgcattcaccctctctcttcatagctcagacatgaaatttgagggagaaaactggagataattgggagaaaattgatgaagttggctgcttccagtagatcagataatccatgaatttgtctcccattgagaattttattttaaattcttttaaactcttcgttgtgtcttttgtgatgacaaatcaggcatgactaaaagatgtacagagacttacgaagatggtcacattcaagttccctaatgctcttagaacctgaagatgaccatgtgtagttttcttaagacctctgaacccccatggtgatgaagacttgaagacatttgcagctatctgctgcagtctggtagattcatacttatctaaagaagtcaaaaaatttattcgtgcaagtgcttgcaggaagccagtgcttattagtagtgaccctgcttctatcaacgttattgagacaacacatattctattctaagggagaaagagggaggaagagagggagggagggaggaagaagagggagggagcgaggaaggaagataggagatgggtaggggggtaaagagaaaaggagggagaagggaaggaaggaaagaagagaggaaagaaaggagggaaggaaaaaagggccaaactttctgatctatgaacttctcagttcagctgtcacattatgagaagtaaatcagaatttttttaaggagaagtcattcttagcactacaataattgtaccagtaattgaggaaaccaagacaatcttcacctgaataatagagggtctgagaactgtcagccttttgccattcaaaaacatttatgtccaacctgaaaaaaaagcatcaataaaacctatcccaagcattc

SEQ ID NO: 7260 - DNA, 3498 bp, Homo sapiens
gacaacctcagaatagaattgaataaatcaagtttatcattaaaacgcaaagaaaaaaaaactctccaaacgttgctgatcttctgttttaaactactgttagactggtgagctggagagccgggggaatccaccaaagatttttggatgaaaattaatcatcccttgtccaccgtagtcgcaccccaatgcccctcagatccagtccttcgaaggagtgtccaagaggtataaagcaaaaccggaaaaacagttcccaaattctggagtttgttttctctcattaaaaatataaatatcaggctaacacctattgacacacaataacagggacacagaatccctcccggaagacccatgggcccacggaccccgcggatgccacagtggttgacgaggttaagtaactgggttcagggtgtctgggcatacctgtgcgtgagactctgtctccgctgctcccctcatctccactgctcccctcgtctccccacgatcctcccttttccttgggccgctgatggctctccgactcacgaagagtctccctggcccctgcagctctctccttcccagacctttacttcttgatcctcactccatagtgagatgtggcctaaggtaggggaaagtccagcacgagaatccgtctgatggcctttggattactcaggggtgtgcccggagactagatgaaagtagcaaaggctttatttagttcccagtactccaaactgcagcaaaccaccggaaacacccccactttcaaagacaggctttgagcagaggaaatgtaatttcaagattagatccagcacagagaatattccagaggtggcaggtttagcttccagccaccacgactcaaggcccctaaatgctgtacagcctgtgtagtacaataactttgttggctagaaatgtaatagcccttcaagcatgaacttggagcatgaagggtaagaaggcctgctttggccgggagttgaacccaggtctcccgcgtaggtggggagaatgccaccgctgaactaccaatgctccactgagtgcggtttcactagatctaattttgaagagtctctggaaggactttgaagcagtgtttctaaaatagatttgtataggactcttgagtagacacaccgagcaaacagaaaggacacccagagcaaagccttgcataggagacgtatgtcaggcaacattatcaagttatttataatggcatttaaatcaacataccagatttgaaagagcctaattgtgaaacaggctctatacaactagataacagacctctatggaaatacacaggaaattcatccaggcctttgtctctggtcccagatctggcaaaaacctctggaaatttcatttcctcactgatgatgtaatctttttgccaacccatgccttggtgtttcccaaactctttcctctcaaccttgagacaatcacaaattctttccctaaacaggctttcaaagacccaggagctggagatttagggatgtgtccaggttaccctggaagatctgtgggatgatggagcttctcttcctctacacctcttttgagtcatgtgaaaaagccaagtatcttgcttctaaattcatatgtttttgagaaacctacaaagagatctgcacaagagagaaagtgaaaatttcactccaagatttcttcccttggcaaacaacagaaggtttaggacaagccttttctctaagtgcctgttgctttgttagctctgttttccaaagacatctgtgttgtggatctggtcagaaagagtgggaattcagtgactttactagttctggatggggattcctatgagaaagcagtgaaaacacgggtggacttgaaagagttgggtcaaagtcagaaggagcaaggtttgagtgataatatactttcccctgtgatgaatggaggtgtgcaaacttggacccagccccggctctgctatctcgtgaaggagggaggcagccatggcttctctctgaaaactgtccaaggtaaaaagggggtatacatgactgatattacacctcaaggtgtggctatgagagctggagttctggctgatgatcacttgattgaagtgaatggagagaatgtagaggatgccagccatgaggaagtggttgaaaaggtgaagaagtcaggaagccgtgtcatgttcctgctggtggacaaagaaactgacaagcgtcatgttgagcagaagatacaattcaaaagagaaacagccagtttgaaactgttaccccaccagccccgaattgtggagatgaagaaaggaagcaatggctatggtttctatctgagggcaggctcagaacagaaaggtcaaatcatcaaggacatagattctggaagtccagcagaggaggctggcttgaagaacaatgatctggtagttgctgtcaacggcgagtctgtggaaaccctggatcatgacagtgtggtagaaatgattagaaagggtggagatcagacttcactgttggtggtagacaaagagacggacaacatgtacagactggctcatttttctccatttctctactatcaaagtcaagaactgcccaatggctctgtcaaggaggctccagctcctactcccacttctctggaagtctcaagtccaccagatactacagaggaagaagatcataagcctaaactctgcaggctggctaaaggtacagaagggcggtcctgctgacttggctgggctagaggatgaggatgtcatcattgaagtgaatggggtgaatgtgctagatgaaccctatgagaaggtggtggatagaatccagagcagtgggaagaatgtcacacttctagtctgtggaaagaaggcctatgattatttccaagctaagaaaatccctattgtttcctccctggctgatccacttgacacccctccagattctaaagaaggaatagtggtggagtcaaagcatgactcgcacatggcaaaagaacgggcccacagtacagcctcacattcttcttccaattctgaagatacagagatgtgatgaaaacaagtaatagctttggctgtttatttgatagctgtttctgggtatttaataggaatcctttctcaaagaatgagttgcgacctgtttactgtctctttagaagaaaaactccactggaaaccattcaccatgtgtgattgtcttctgttatcatttgtcttacaggcggctattgcagacggctaatttatgcttaacttaggaagagataaggcaagagctagatttttttcatgtgatcttttccaagcttcaacttaactacatttctctgtatgatgatgtctcttacttctacaggttccttgagcaccaaagatgattcataactctgtataggtgacagctgcttataaaagcatcttagcagataagcctattaaaattgtgcttttgtaacaatgttgtggttgctagaataaataccattaac

SEQ ID NO: 7261 - DNA, 771 bp, Homo sapiens
cggaaattctgcatattgaagcaggtggctcctggtacgaaatctctggatacatttggcttgccaagttttgctcttcgctgtcccctcccgtttacagaagcatctgtggtgcttttcattttggatttacatgcaggaaacgtatatatgtttatataccgaccgcataatatataaatacatatacgcgtgcccaagggcctggttttcgtctctcctccccacgaaacggaatgttttggagccgatggataacaagaacactattaacattcttttgagcctgttttttaaaagggggagggagcgtgaagaattgtttaacatttggccatcgtttggctgcacactaagcaccacgaagtatttatggttgcagatcaggtgcaaacggggcttagagagaaaggatatagacctgcagctaactggatttgatttataagagagaaatctgcagtcaatgcccactcttgccacactgctaatatggaaaacagaatgttcaataggatatggtctgataaatagtgatgattgaagatgctgctccaatacatgtgaaatcaatgggagatatctgctgtctgaagatctttcagagcttttctcgacaagctcccctgtaagaaatcggaggtatattctaccattatacagtctttctcaagtggatataaatacgtttgcctcactgtaaccagacaactagacaactaatgtgggaccatggcactgcccagatgcacgtggccaaattatgtttgg

SEQ ID NO: 7262 - DNA, 842 bp, Homo sapiens
caacacaaggcccttgcagtggggtgcgctcagagcagagggccttaagaatggctcctctgtttacaacacacccaacaggaatctgggcttactcctcacaggtggcatgatactttggccttcctgtgacatcatgccctatacatgtctcccctggagaagcccaagggactgctttgcacagggccagtgggaaatggctcagtattggaggccaagaccataaactgtgtttggtagtgagtctggggctggagggtcttagaaatccctctccaggggctgtttgtatttgtttggaggaggttgccacctggtgtctagtgcttagacagcagggttgcttggttagaaacaagtttcatttcctttttccaaggtacctggagtacaagagggtccctaacagcagaccacctgaatatgagttcttctggggcttgcgctcctaccacgagactagcaagatgaaagtcctcaagtttgcatgcagggtgcagaagaaagaccccaaggactgggctgtgcagtaccgcgaggcagtggagatggaagtccaagctgcagctgtggctgtggctgaggctgaagccagggctgaggcaagagcccaaatggggattggagaggaagctgtggctgggccctggaattgggatgacatggatatcgactgcctaacaagggaagagttaggcgatgatgctcaggcctggagcagattttcatttgaaattgaggccagagcccaagaaaatgcagatgccagcaccaacgtcaacttcagcagaggagctagtaccagggctggcttcagcgatggtgctagtattagcttc

SEQ ID NO: 7263 - DNA, 1890 bp, Homo sapiens
gccagtaacaaacatggctccctgaagccgctcaggctcaagagcaacatggaggtctgcacttaatcgctcctctccgggggcggccatactgaggaggcatctcttccgtgcaggcaggctctcctggggacctcagagattctctccagcggcagcagaaaacgggcaatgggtggattcgggtccagattctggcaggagggagtttgggatcgagatctggaaaaaagcactagactggaagaggacgcgatggagtcggagccgctggcgggtacaaaaaccagaggccggggaaggcgccggtgggaggcaaggcacggatggactttacctgcgcacgcgtcgcagccatctccgcgcacagtggtggccaccgcgactggtgctgaagtgtcggcgtgtgccgggcgctccgctgggacccgggttgctcgccctgagtctcagctttctcatctgtacggttgggacaagtacagtaaccctcgcccgtcaagacgggccagggctgtggcgagggtccacgccttagagcaggcacctatcttgtgcagggccctgagatggggtctgactcagttcctgcggggaacttcaccagtgacccagtcagtgcccttcagttaaagaccaccaggagcacacttatatcatggaaatcaggacagtggcagttcggattgtggcaatcaaaggggtggaaagtgaattctatcttgcaatgaacgaggaaggaaaactctatgcaaagaaagaatgcaatgaagattgtaacttcaaagaactaattctggaaaaccattacaacacatatgcagcagctaaatggacacacaatggaggggaaatgtttgttgccttaaatcaaaaggggattcctgtaagaggaaaaaaaacgaagaaagaacaaaaaacagcccactttcttcctatggcaataacttaattgcatatggtatataaagaaccagttccagtagggagatttctttaagtggactgttttctttcttctcaaaattttctttccttttattttttagtaatcaagaaaggctggaaaactactgaaaaactgatcaagcttgacttgtgcatttatgtttgttttaagacactgcattaaagaaagatttgaaaagtatacacaaaaatcagatttagtaactaaaggttgtacaaaattgtaaaactggttgtacaatcatgatgttagtaatagtaatttttttcttaaattaatttacccttaagagtatgttagatttgattatctgataatgattatttaaatattcctatctgcttataaaatggctgctataataataataatgcagatgatgttatataaggtgtatcagacctacaggctgctggcaggatttgtcagataatcaagccacactaactatagaaaatgagcagcattttaaatgctttctagtgaaaaattataatctacttaaactctaatcagaaaaaaagaatattctcaaaaaaatctattacgaaagtcaataaaatagataatttaacaaaagtacaggattagaacatgcttatacctattaacaagaacaaaatttctaatgctgctcaagtggaaagggtattgctaaaaggatgtttccaaaaatcttgtatataagatagcaacagtgattgatgataatactgtacttcatcttacttgccacaaaataacattttataatttctcaaagtaaaattgagaaatctttaagtttttttcaagtaacataatctatctttgtataattcgtatttgggaatatggcttttaataatgttcttcccacaaataatcatgcttttttcctatggttacagcattaaactatattttaagttgtttttgaa

SEQ ID NO: 7264 - DNA, 632 bp, Homo sapiens
actttaccttctcctccagcacaggaactaggaactacggagagagaagccaagggagaggaggaggaggaaactaacgattccctgcccacccccacacccagcaccaccaacaggtgggcaagcttgccgagaaaacgcagagggcatcctgtgagcagcaaacacatctgagcctggaaaagacgcagagaagtaaaagatcaaagcgcctactccaggatcccgtagccagacctcaagccatggctggtcccttctcccgtctgctgtccgcccgcccgggactcaggctcctggctttggccggagcggggtctctagccgctgggtttctgctccgaccggaacctgtacgagctgccagtgaacgacggaggctgtatcccccgagcgctgagtacccagacctccgaaagcacaacaactgcatggccagtcacctgaccccagcagtctatgcacggctctgcgacaagaccacacccactggttggacgctagatcagtgtatccagactggcgtggacaaccctggccaccccttcatcaagactgtgggcatggtggctggagatgaggagacctatgaggtatttgctgacctgtttgaccctgtgatccaagagcga

SEQ ID NO: 7265 - DNA, 1039 bp, Homo sapiens
attacacaccccagtacaccagcagaggaaacttataacctcgggaggcaggtccttcccctcagtgcggtcacatacttccagaagagcggaccagggctgctgccagcacctgccactcagagcgcctctgtcgctgggacccttcagatgccctcaagacagtgcaggccttcatgattctctctatcatcttctgtgtcattgccctcctggtcttcgtgttccagctcttcaccatggagaagggaaaccggttcttcctctcaggggccaccacactggtgtgctggctgtgcattcttgtgggggtgtccatctacactagtcattatgcgaatcgtgatggaacgcagtatcaccacggctattcctacatcctgggctggatctgcttctgcttcagcttcatcatcggcgttctctatctggtcctgagaaagaaataaggccggacgagttcatggggatctggggggtggggaggaggaagccgttgaatctgggagggaagtggaggttgctgtacaggaaaaaccgagataggggaggggggagggggaagcaaaggggggaggtcaaatcccaaaccattactgaggggattctctactgccaagcccctgccctggggagaaagtagttggctagtactttgatgctcccttgatggggtccagagagcctccctgcagccaccagacttggcctccagctgttcttagtgacacacactgtctggggccccatcagctgccacaacaccagccccacttctgggtcatgcactgaggtccacagacctactgcactgagttaaaatagcggtacaagttctggcaagagcagatactgtctttgtgctgaatacgctaagcctggaagccatcctgcccttctgacccaaagcaaaacatcacattccagtctgaagtgcctactggggggctttggcctgtgagccattgtccctctttggaacagatatttagctctgtggaattcagtgacaaaatgggaggaggaaagagagtttgta

SEQ ID NO: 7266 - DNA, 5941 bp, Homo sapiens
gcggccgctaagaggagaccaagaggcgggggctgcacttgacaaccagcatgccgagatggcacaccttgggcccaccccacctccacatagccttaattacaaatcagaggacaggcttagtgagcaagactggccagcatatttcaaggtcccatgttgtggggttgatacatctcaaattgagtcagaagaggcagaagtggatgtgagagaaagagagacacagagagacagagagccaaagagggcaagagacttgactttaagagactcctgtactgacaactccatgcagttcggaaccagaacgactacggctgaaccagggttcatggggacatggcaaaacgctgatactaacctcttattcagaatgtcccaacaggccatccgttgcacactggtaaactgcacatgtgaatgttttcagccagggaagattaacctgaggacttgtgatcagtgtaaacatggctgggtggcacatgccttggataagctcagcacgcagcacctgtaccaccccacccaagtggagattgtgcagtccaacgtcgtgtttgacatcagcagcctgatgctctatgggacacaagcagtgcctgtgcggctaaagatcctgctggaccgtctcttcagcgtcctgaagcaagaggaggtactgcacatactgcacggccttggctggactctgcgggactatgtccgaggatacatccttcaggatgctgctggcaaggtgctggaccgctgggccatcatgtctcgagaagaggaaatcatcacccttcagcagtttctgcggtttggagaaaccaaatccattgtggagctgatggcaattcaggagaaagaagggcaggccgtggctgtaccatcttcaaagacagactcagatataaggactttcattgagagcaataatcgcaccaggagtcccagcctccttgctcacttagagaacagcaatccttccagcattcatcacttcgaaaacatcccaaacagccttgcatttctgcttccattccagtacataaaccctgtctcagcaccactgctagggttgcctccaaatgggctactgttagagcaaccagggttgaggctgcgggaacccagcctttcaactcagaatgaatataatgagagcagcgaatccgaagtttctcccacaccttataagaatgatcaaacacccaatagaaatgccctgaccagcattactaatgtggagcccaaaaccgagccagcctgtgtctctcccattcagaattctgccccagtcagtgatctaaccaaaactgaacacccaaaaagctcattccggattcatcggatgagaaggatggggtcagcctctaggaaaggaagagtgttctgtaatgcatgtgggaagacattctatgacaaaggtactctcaaaattcattacaatgctgttcacctgaagatcaaacatcgatgcaccattgaaggttgcaacatggtctttagctccctccgaagtcgtaatcgccacagtgcaaaccccaatcctcgccttcacatgcctatgctaaggaataaccgagataaagatttaattcgggccacctcaggagctgccacccctgtcatagcaagtacaaaatcaaatctggcactcacaagccctggccgacccccaatgggttttaccactccccctctagaccctgtcttgcaaaatcctctccctagccagctagtattttctgggctaaagactgtacaaccagttcctccattttatagaagtttactcactccaggggaaatggtgagtcctccaacctccctcccaaccagtcccatcattccaaccagtggtaccatagagcagcaccccccgccaccctctgagccagtagtgccagcagtgatgatggccacccatgagcccagtgctgacctggcacccaagaaaaagcccaggaagtcaagcatgcctgtgaagattgagaaggaaattattgataccgccgatgagtttgatgatgaagatgatgaccccaatgatggtggagctgtggtcaatgacatgagccatgacaatcattgtcactcccaagaggagatgagcccaggcatgtctgtgaaggacttttctaagcataacaggacccggtgcatttcaaggactgaaataaggagggccgacagcatgacttctgaagaccaagaacctgagcgggactatgagaacgagtctgagtcttcggagcccaaactgggcgaggaatccatggaaggggatgagcacattcacagcgaagtgagtgaaaaagtcctgatgaatagtgagaggcctgatgagaaccacagtgagccctctcaccaggacgtcatcaaggtgaaggaagaatttacagaccccacttacgacatgttttacatgagccagtatggactgtacaatggtgggggtgccagcatggccgccttgcatgagagctttacatcgtctctgaattatggcagccctcaaaagttctccccagaaggtgacctatgttctagcccagaccccaaaatctgttatgtgtgcaagaagagtttcaaaagctcctacagtgtgaaacttcactacaggaacgttcacttgaaagagatgcacgtctgcacagtggctggttgcaatgctgcattcccctctcgccgaagccgagacagacacagtgccaacataaacctacatcgtaaactgttgaccaaagaactcgatgacatgggcctggactcgtcgcagccctcccttagcaaggacctccgcgatgaatttttggtgaagatatatggtgcccagcaccccatggggctcgatgtcagggaagacgcctcctctcccgcagggactgaagactcccacctgaacgggtatgggagaggcatggcagaggactacatggtccttgacttgagcaccacctccagcctccagtccagcagcagtatccattcctccagagaatccgacgcaggcagcgatgaggggattcttctcgatgacattgacggggcgagtgacagtggggagtcggcacacaaggccgaggcccctgccctccctggcagcctaggggctgaagtttcaggatctcttatgttcagcagcttgtctgggagcaatggtgggatcatgtgcaacatttgccacaaaatgtacagcaacaaggggaccctgagagtgcactacaaaactgtgcatttgagagaaatgcacaagtgcaaagtcccaggttgcaatatgatgttttcctctgtacgaagccgaaatcggcacagtcagaaccctaatctccacaaaaacattcccttcacttcagtagattagtctcagaatggacactacaaatgccagctctcaccagatggcctacgtgtttgaactgccatagtcagtgtgcgcttatgtacttggggtgtgtgtgtgtgtgtgtgtgtgtgtgcatttatgtatgctctgtggctacatatacacacacgtatttccttgagataaacaagataaacactaggtgcttttgaatttttttcacttccctttatagttttgggaaaggagtgggatctttgatttcagggtgaaaacagagtacccctttaaacacacacacacacacatgcacatacacacacacacacacacacacacacagtgtgcaactagccccagttttgacagaataattcttggtcttccccaaagagacaatttgttgtacccatgactgttgcctgcaaaaataaaagggaaaaaaaagaaaaaagaaacaaaaaggaacttcttatagttgtcttttgtgaactttaaggttttgaaagaatcttcaattaaagcatggcagattcacctgtaaatatttagccttgaggggccattgatgtaaaacaattgtattgatggttgtttaacttttttgtttaatttttacagttacatccagctgttagatatgcaggaaaagatagtttgctggctagctctattcatttatgttagcattaatgcacatttttaaaaaaagaaaaaaacatggtcttgtttttactacctgttagatatagtgctaaagaggtgctggcatgctttacagcacagatctgattttttaaaatgtcctgtactagtacataaatcccgtcatgcactttttttcatacactacaaggggatgtgtaataaccatgcttcttttttatccttaaactattgccatacttcagtaagtgtcttttttaaaaaaaattcacttgtataaaaatggtctggtcagtatagggcacaaatgccaaacaaagtattagtgttaacacaaaactgccaactttgcacaagtttccagaaaagaaaatacaattagtcactcaacataaccacaggccaatttgttggccaccagaaaaccgctttttaaaaaaacacttggtgattctttcaagtgccgaatgttattagaatcaacattgcatccttcttgcttatacgttaagttacataaaaggaaaacaaaattatgtggtgtgaaacagccaaggcatttattcttcagaggcaggataatatttcaggatacaaaagcccaaattacccgctacggaacaaagatgaatacagtaaaagagtcgaacactcatttccaaggccctaacccttatcctttaaaaagaaatcctctgaactgggtcggtctgttgtatggctgtctaatttgttgcaaattctgcagtcgtactataattcaggcctgtttggtagacaaaatcaaaaggcatttaacagcagcagtacttggaagctttgaaaacatgtgctaaacttgaatggagcaacactcctttctgaaaagccagaagaagggggttttaaagcaggatctctcaatgttcagtgttttgtgtttccccacacgatttgtcagagagaaatgaaagcaagcctgaaaccaagcaattgagagtgagaaagaggagagagactattctccaaaccttttttgttttgttttgtttccgatgtttacacatgttgcctgagctggttaaccacatcggcagcctcagctaccacaacatactgactaaatgatgatatttactcaagttcagtctgcagccaaaaccattagggtgtgcattgcagactgttttgttgtcttttttttttcttttttcctttttttttaagtggaggggaaaagaagagataaacaaggaatattttgtcaaacagtacacaataatttaaagagaatgtatttcttttttgcatttaatggcctcagacatttctttcatcagtctaaaagttagaaatatccctttattttaacttttatgtcgtttccatttttcatgtttttgtaattattttttctatgttcacatcagcattcacttccgttaaatttgccaaaggaaactgttaatatgtttctgttgttattattcctgtaggatttattgtacctcacagtatttattgtttcccaaaataagcatcattagttggggattcagtatttttgttgtgaaaatttcagaaacaatagattcttaaagataagctagctatgtctaggagctttatcttttcacctccttcagaggatgctatggggtccattttaattcttcatttgttctacggggaggaaagaccaaaagtatttgcagtacaaaagaaactatatcaaacactatgttaaatgacaagtgtttatggtaaaaagctgaggaattagtaataatcgtttttgttttcttgtactttgaattccccaaagtcttaattgctttattttggtgttgtgttaaattgaacagacagatgttttcctttgttttataccatataagactctgtacagtatgtttgtgaaagattgaactagaataatgaaagtttgtttgcaaa

SEQ ID NO: 7267 - DNA, 1076 bp, Homo sapiens; identical to SEQ ID NO: 164

SEQ ID NO: 7268 - DNA, 2592 bp, Homo sapiens; identical to SEQ ID NO: 4961

SEQ ID NO: 7269 - DNA, 655 bp, Homo sapiens
ggggcagaagagagatgtctgtgagcaccatggaaaaaaactccagatcttctgtaaggaggatggaaaagtcatttgctgggtttgtgaactgtctcaggaacaccaaggtcaccaaacattccgcataaacgaggtggtcaaggaatgtcaggaaaagctgcaggtagccctgcagaggctgataaaggaggatcaagaggctgagaagctggaagatgacatcagacaagagagaaccgcctggaagaattatatccagatcgagagacagaagattctgaaagggttcaatgaaatgagagtcatcttggacaatgaggagcagagagagctgcaaaagctggaggaaggatgccagcacgctcatctcagatctccagcggaggttgaggggatcgtcagtagagatgctgcaggatgtgattgacgtcatgaaaaggagtgaaagctggacattgaagaagccaaaatctgtttccaagaaactaaagagtgtattccgagtaccagatctgagtgggatgctgcaagttcttaaagagctgacagatgtccagtactactgggtggacgtgatgctgaatccaggcagtgccacttcgaatgttgctatttctgtggatcagagacaagtgaaaactgtacgcacctg

SEQ ID NO: 7270 - DNA, 870 bp, Homo sapiens
gtattagcaagacatgaaaatctgtaggggcaccagaacctttaatcaagctcatgttttattgtaaaatattaggatgtagacaatacaatggtgggtgaagagaagatgtctctaagaaaccggctgtcaaagtccagggaaaatcctgaggaagatgaagaccagagaaaccctgcaaaggagtccctagagacacctagtaatggtcgaattgacataaaacagttgatagcaaagaagataaagttgacagcagaggcagaggaattgaagccattttttatgaaggaagttggcagtcactttgatgattttgtgaccaatctcattgaaaagtcagcatcattagataatggtgggtgcgctctcacaaccttttctgttcttgaaggagagaaaaacaaccatagagcgaaggatttgagagcacctccagaacaaggaaagatttttattgcaaggcgctctctcttagatgaactgcttgaagtggaccacatcagaacaatatatcacatgtttattgccctcctcattctctttatcctcagcacacttgtagtagattacattgatgaaggaaggctggtgcttgagttcagcctcctgtcttatgcttttggcaaatttcctaccgttgtttggacctggtggatcatgttcctgtctacattttcagttccctattttctgtttcaacattgggccactggctatagcaagagttctcatccgctgatccgttctctcttccatggctttcttttcatgatcttccagattggagttctaggttttggaccaacatatgttgtgttagcatatacactgccaccagcttcccggttcatcattatattcgagcag

SEQ ID NO: 7271 - DNA, 2034 bp, Homo sapiens
cgtcccgccatggctctgaggcgcgccctgcccgcgctgcgcccctgcattccccgcttcgtcccgctgtccacggcgccggcctcccgcgagcagcccgcagcgggcccagcggccgtgccaggaggaaacttctaggacagaggctattcaacaagctcatgaagatgaccttctatgggcattttgtagccggggaggaccaggagtccatccagcccctgcttcggcactacagggccttcggtgtcagcgccatcctggactatggagtggaggaggacctgagccccgaggaggcagagcacaaggagatggagtcctgcacctcagctgcggagagggatggcagtggcacgaataagcgggacaagcaataccaggcccactgggccttcggggaccgcaggaatggtgtcatcagtgcccgcacctacttctacgccaatgaggccaagtgcgacagccacatggagacattcttgcgctgcatcgaagcctcaggtagagtcagcgatgacggcttcatagccattaagctcacagcactggggagaccccagtttctgctgcagttctcagaggtgctggccaagtggaggtgcttctttcaccaaatggctgtggagcaagggcaggcgggcctggctgccatggacaccaagctggaggtggcggtgctgcaggaaagtgtcgcaaagttgggcatcgcatccagggctgagattgaggactggttcacggcagagaccctgggagtgtctggcaccatggacctgctggactggagcagcctcatcgacagcaggaccaagctgtccaagcacttggtagtccccaacgcacagacaggacagctggagcccctgctgtcccggttcactgaggaggaggagctacagatgaccaggatgctacagcggatggatgtcctggccaagaaagccacagagatgggcgtgcggctgatggtggatgccgagcagacctacttccagccggccatcagccgcctgacgctggagatgcagcggaagttcaatgtggagaagccgctcatcttcaacacataccagtgctacctcaaggatgcctatgacaatgtgaccctggacgtggagctggctcgccgtgagggctggtgttttggggccaagctggtgcggggcgcatacctggcccaggagcgagcccgtgcggcagagatcggctatgaggaccccatcaaccccacgtacgaggccaccaacgccatgtaccacaggtgcctggactacgtgttggaggagctgaagcacaacgccaaggccaaggtgatggtggcctcccacaatgaggacacagtgcgctttgcactgcgcaggatggaggagctgggcctgcatcctgctgaccaccgggtgtactttggacagctgctaggcatgtgtgaccagatcagcttcccgctgggccaggccggctaccccgtgtacaagtacgtgccctatggccccgtgatggaggtgctgccctacttgtcccgccgtgccctggagaacagcagcctcatgaagggcacccatcgggagcggcagctgctgtggctggagctcttgaggcggctccgaactggcaacctcttccatcgccctgcctagcacccgccagcacacccttagcctccagcaccccccgcccccgcccaggccatcaccacagctgcagccaaccccatcctcacacagattcaccttttttcaccccacacttgcagagctgctggaggtgaggtcaggtgcctcccagccctgcccagagtatgggcactcaggtgtgggccgaacctgatacctgcctgggacagccactggaaacttttgggaactctcctcgaatgtgtgggcccaaggcccccacctctgtgacccccatgtccttggacctagaggattgtccaccttctgccaaggccagcccacacagcccgagccccttggggagcagtggccgggctggggaggcctgcctggtcaataaaccactgttcctgca

SEQ ID NO: 7272 - DNA, 501 bp, Homo sapiens
tttgatgatcttatggcggagaaggaagctgtatcttcaaaatgtgtcaatttggctaaagagaatcaagtttttcaacaggagttattatctatgaaaaaagtacaacaggaatgtgaaaaacttgaggaagataaaaagatgttggaagaagaaatattaaatcttaagacacatatggaaaacagtatggtagaacttagtaaactacaagaatataaatcagagctagatgaaagggcaatgcaggcagtagaaaaattagaagaaatccatttacagatggggctggactgtgtagaataaataattagagaaacaaagagaactgttgctgtattggacacttgctcccatctactttcttctctagaatccacggctctggaatgagtcattttttttagaagcagaggtggagccactgaggaaacacaggtgagccctccccagtgtgtactcactggtccccaacagaagaaccactgccacatccactga

SEQ ID NO: 7273 - DNA, 2484 bp, Homo sapiens
actagttaacaggcattgcctgaaaagagtataaaagaatttcagcatgattttccatattgtgcttccaccactgccaataacaaaataactagcaaccatgaagtgggtggaatcaatttttttaattttcctactaaattttactgaatccagaacactgcatagaaatgaatatggaatagcttccatattggattcttaccaatgtactgcagagataagtttagctgacctggctaccatattttttgcccagtttgttcaagaagccacttacaaggaagtaagcaaaatggtgaaagatgcattgactgcaattgagaaacccactggagatgaacagtcttcagggtgtttagaaaaccagctacctgcctttctggaagaactttgccatgagaaagaaattttggagaagtacggacattcagactgctgcagccaaagtgaagagggaagacataactgttttcttgcacacaaaaagcccactccagcatcgatcccacttttccaagttccagaacctgtcacaagctgtgaagcatatgaagaagacagggagacattcatgaacaaattcatttatgagatagcaagaaggcatcccttcctgtatgcacctacaattcttctttgggctgctcgctatgacaaaataattccatcttgctgcaaagctgaaaatgcagttgaatgcttccaaacaaaggcagcaacagttacaaaagaattaagagaaagcagcttgttaaatcaacatgcatgtgcagtaatgaaaaattttgggacccgaactttccaagccataactgttactaaactgagtcagaagtttaccaaagttaattttactgaaatccagaaactagtcctggatgtggcccatgtacatgagcactgttgcagaggagatgtgctggattgtctgcaggatggggaaaaaatcatgtcctacatatgttctcaacaagacactctgtcaaacaaaataacagaatgctgcaaactgaccacgctggaacgtggtcaatgtataattcatgcagaaaatgatgaaaaacctgaaggtctatctccaaatctaaacaggtttttaggagatagagattttaaccaattttcttcaggggaaaaaaatatcttcttggcaagttttgttcatgaatattcaagaagacatcctcagcttgctgtctcagtaattctaagagttgctaaaggataccaggagttattggagaagtgtttccagactgaaaaccctcttgaatgccaagataaaggagaagaagaattacagaaatacatccaggagagccaagcattggcaaagcgaagctgcggcctcttccagaaactaggagaatattacttacaaaatgcgtttctcgttgcttacacaaagaaagccccccagctgacctcgtcggagctgatggccatcaccagaaaaatggcagccacagcagccacttgttgccaactcagtgaggacaaactattggcctgtggcgagggagcggctgacattattatcggacacttatgtatcagacatgaaatgactccagtaaaccctggtgttggccagtgctgcacttcttcatatgccaacaggaggccatgcttcagcagcttggtggtggatgaaacatatgtccctcctgcattctctgatgacaagttcattttccataaggatctgtgccaagctcagggtgtagcgctgcaaacaatgaagcaagagtttctcattaaccttgtgaagcaaaagccacaaataacagaggaacaacttgaggctgtcattgcagatttctcaggcctgttggagaaatgctgccaaggccaggaacaggaagtctgctttgctgaagagggacaaaaactgatttcaaaaactcgtgctgctttgggagtttaaattacttcaggggaagagaagacaaaacgagtctttcattcggtgtgaacttttctctttaattttaactgatttaacactttttgtgaattaatgaaatgataaagacttttatgtgagatttccttatcacagaaataaaatatctccaaatgtttccttttccaagtttgcttatttatgaaaagttatcgataatttctttagttttgtataccattgtctgaagcagattctgttaaaatagcattaagtgttggttattataggagattaaagctatccaaggatggatttacagcactagatcacttggtgaactgaaaaatgttcccaagttaaacactatttgatgctaccagggcattttgtttattaaatgaccatcactgaagtattctaacagataatctggagatgagaaaagaaattattattcttctatgggatctaagaaaatttaacatctactttttttctcaatcttgttcagttctctattcacagacattttaaaacataagaatattacagttttgattgaatataattaa

SEQ ID NO: 7274 - DNA, 2345 bp, Homo sapiens
ctgctcgcggccgccaccgccgggccccggccgtccctggctcccctcctgcctcgagaagggcagggcttctcagaggcttggcgggaaaaagaacggagggagggatcgcgctgagtataaaagccggttttcggggctttatctaactcgctgtagtaattccagcgagaggcagagggagcgagcgggcggccggctagggtggaagagccgggcgagcagagctgcgctgcgggcgtcctgggaagggagatccggagcgaatagggggcttcgcctctggcccagccctcccgctgatcccccagccagcggtccgcaacccttgccgcatccacgaaactttgcccatagcagcgggcgggcactttgcactggaacttacaacacccgagcaaggacgcgactctcccgacgcggggaggctattctgcccatttggggacacttccccgccgctgccaggacccgcttctctgaaaggctctccttgcagctgcttagacgctggatttttttcgggtagtggaaaaccagcagcctcccgcgacgatgcccctcaacgttagcttcaccaacaggaactatgacctcgactacgactcggtgcagccgtatttctactgcgacgaggaggagaacttctaccagcagcagcagcagagcgagctgcagcccccggcgcccagcgaggatatctggaagaaattcgagctgctgcccaccccgcccctgtcccctagccgccgctccgggctctgctcgccctcctacgttgcggtcacacccttctcccttcggggagacaacgacggcggtggcgggagcttctccacggccgaccagctggagatggtgaccgagctgctgggaggagacatggtgaaccagagtttcatctgcgacccggacgacgagaccttcatcaaaaacatcatcatccaggactgtatgtggagcggcttctcggccgccgccaagctcgtctcagagaagctggcctcctaccaggctgcgcgcaaagacagcggcagcccgaaccccgcccgcggccacagcgtctgctccacctccagcttgtacctgcaggatctgagcgccgccgcctcagagtgcatcgacccctcggtggtcttcccctaccctctcaacgacagcagctcgcccaagtcctgcgcctcgcaagactccagcgccttctctccgtcctcggattctctgctctcctcgacggagtcctccccgcagggcagccccgagcccctggtgctccatgaggagacaccgcccaccaccagcagcgactctgaggaggaacaagaagatgaggaagaaatcgatgttgtttctgtggaaaagaggcaggctcctggcaaaaggtcagagtctggatcaccttctgctggaggccacagcaaacctcctcacagcccactggtcctcaagaggtgccacgtctccacacatcagcacaactacgcagcgcctccctccactcggaaggactatcctgctgccaagagggtcaagttggacagtgtcagagtcctgagacagatcagcaacaaccgaaaatgcaccagccccaggtcctcggacaccgaggagaatgtcaagaggcgaacacacaacgtcttggagcgccagaggaggaacgagctaaaacggagcttttttgccctgcgtgaccagatcccggagttggaaaacaatgaaaaggcccccaaggtagttatccttaaaaaagccacagcatacatcctgtccgtccaagcagaggagcaaaagctcatttctgaagaggacttgttgcggaaacgacgagaacagttgaaacacaaacttgaacagctacggaactcttgtgcgtaaggaaaagtaaggaaaacgattccttctaacagaaatgtcctgagcaatcacctatgaacttgtttcaaatgcatgatcaaatgcaacctcacaaccttggctgagtcttgagactgaaagatttagccataatgtaaactgcctcaaattggactttgggcataaaagaacttttttatgcttaccatcttttttttttctttaacagatttgtatttaagaattgtttttaaaaaattttaagatttacacaatgtttctctgtaaatattgccattaaatgtaaataactttaataaaacgtttatagcagttacacagaatttcaatcctagtatatagtacctagtattataggtactataaaccctaattttttttatttaagtacattttgctttttaaagttgatttttttctattgtttttagaaaaaataaaataactggcaaatatatcattgagccaaa

SEQ ID NO: 7275 - DNA, 1420 bp, Homo sapiens; identical to SEQ ID NO: 6854

SEQ ID NO: 7276 - DNA, 3169 bp, Homo sapiens
gttccagtgatcaagtggaagaaagatggcattcatctggccttgggaatggatgaaaggaagcagcaactttcaaatgggtctctgctgatacaaaacatacttcattccagacaccacaagccagatgagggactttaccaatgtgaggcatctttaggagattctggctcaattattagtcggacagcaaaagttgcagtagcagactaggtgtcatgtgatataactggacccaggagaatgaccccacaactgaaagatttttatgaaggatgatttactattctccaacgtactgacatttttctacagcccaatcattgctggggagaccactgaggttcctttcacagacagaatctgtcacagccttcatgggagacacagtgctactcaagtgtgaagtcattggggagcccatgccaacaatccactggcagaagaaccaacaagacctgactccaatcccaggtgactcccgagtggtggtcttgccctctggagcattgcagatcagccgactccaaccgggggacattggaatttaccgatgctcagctcgaaatccagccagctcaagaacaggaaatgaagcagaagtcagaattttatcagatccaggactgcatagacagctgtattttctgcaaagaccatccaatgtagtagccattgaaggaaaagatgctgtcctggaatgttgtgtttctggctatcctccaccaagttttacctggttacgaggcgaggaagtcatccaactcaggtctaaaaagtattctttattgggtggaagcaacttgcttatctccaatgtgacagatgatgacagtggaatgtatacctgtgttgtcacatataaaaatgagaatattagtgcctctgcagagctcacagtcttggttccgccatggtttttaaatcatccttccaacctgtatgcctatgaaagcatggatattgagtttgaatgtacagtctctggaaagcctgtgcccactgtgaattggatgaagaatggagatgtggtcattcctagtgattattttcagatagtgggaggaagcaacttacggatacttggggtggtgaagtcagatgaaggcttttatcaatgtgtggctgaaaatgaggctggaaatgcccagaccagtgcacagctcattgtccctaagcctgctatcccaagctccagtgtcctcccttcggctcccagagatgtggtccctgtcttggtttccagccgatttgtccgtctcagctggcgcccacctgcagaagcgaaagggaacattcaaactttcacggtctttttctccagagaaggtgacaacagggaacgagcattgaatacaacacagcctgggtcccttcagctcactgtgggaaacctgaagccagaagccatgtacacctttcgagttgtggcttacaatgaatggggaccgggagagagttctcaacccatcaaggtggccacacagcctgagttgcaagttccagggccagtagaaaacctgcaagctgtatctacctcacctacctcaattcttattacctgggaaccccctgcctatgcaaacggtccagtccaaggttacagattgttctgcactgaggtgtccacaggaaaagaacagaatatagaggttgatggactatcttataaactggaaggcctgaaaaaattcaccgaatatagtcttcgattcttagcttataatcgctatggtccgggcgtctctactgatgatataacagtggttacactttctgacgtgccaagtgccccgcctcagaacgtctccctggaagtggtcaattcaagaagtatcaaagttagctggctgcctcctccatcaggaacacaaaatggatttattaccggctataaaattcgacacagaaagacgacccgcaggggtgagatggaaacactggagccaaacaacctctggtacctattcacaggactggagaaaggaagtcagtacagtttccaggtgtcagccatgacagtcaatggtactggaccaccttccaactggtatactgcagagactccagagaatgatctagatgaatctcaagttcctgatcaaccaagctctcttcatgtgaggccccagactaactgcatcatcatgagttggactcctcccttgaacccaaacatcgtggtgcgaggttatattatcggttatggcgttgggagcccttacgctgagacagtgcgtgtggacagcaagcagcgatattattccattgagaggttagagtcaagttcccattatgtaatctccctaaaagcttttaacaatgccggagaaggagttcctctttatgaaagtgccaccaccaggtctataaccgatctctccacccccatgctcccaccagtaggtgtacaggctgtggctcttacccatgatgctgtgagggtcagctgggcagacaactctgtccctaagaaccaaaagacgtctgaggtgcgactttacaccgtccggtggagaaccagcttttctgcaagtgcaaaatacaagtcagaagacacaacatctctaagttacacagcaacaggcctcaaaccaaacacaatgtatgaattctcggtcatggtaacaaaaaacagaaggtccagtacttggagcatgactgcacatgccaccacgtatgaagcagcccccacctctgctcccaaggacttgacagtcattactagggaagggaagcctcgtgccgtcattgtgagttggcagcctcccttggaagccaatgggaaaattactgcttacatcttattttataccttggacaagaacatcccaattgatgactggattatggaaacaatcagtggtgataggcttactcatcaaatcatggatctcaaccttgatactatgtattactttcgaattcaagcacgaaattcaaaaggagtggggccactctctgatcctatcctcttcaggactctgaaagtggaacaccctgacaaaatggctaatgaccaagacactggcgtgacgattaatcttgttaatgaagttctgcttggctgaggctgcggctctgataaggaagatgtaaattttcttgagaggaaattgttttgtctccattctgaaggaccaattaaaatgtcaagcttctttgtatg

SEQ ID NO: 7277 - DNA, 2107 bp, Homo sapiens
actgtaagtatatatgtatggatatggttgtaacattttccctccctctccctctaatttaaaaggtgagtgtttctatggttggctagaacctctgttggccagaatagctgagaactacacggctgtcgtaagtccagatattgcatccatagatctgaacacgtttgaattcaacaaaccttctccttatggaagtaaccataaccgtggaaattttgactggagtctttcatttggctgggagtcgcttcctgatcatgagaagcaaagaaggaaagatgaaacctacccaattaaaacacccacttttgcaggaggacttttttccatatcaaaagaatattttgagtatattggaagctatgatgaagaaatggaaatctggggaggtgaaaatatagaaatgtctttcagagtatggcaatgtggtgggcagttggagattatgccttgctctgttgttggacatgtttttcgcagcaaaagccctcatagctttccaaaaggcactcaggtgattgctagaaaccaagttcgccttgcagaagtctggatggatgaatacaaggaaatattttataggagaaatacagatgcagcaaaaattgttaaacaaaaagcatttggtgatctttcaaaaagatttgaaataaaacaccgccttcagtgtaaaaattttacatggtatctgaacaacatttatccagaggtgtatgtgccagaccttaatcctgttatatctggatacattaaaagcgttggtcagcctctatgtctggatgttggagaaaacaatcaaggaggcaaaccattaattatgtatacatgtcatggacttgggggaaaccagtactttgaatactctgctcaacatgaaattcggcacaacatccagaaggaattatgtcttcatgctgctcaaggtctcgttcagctgaaggcatgtacctacaaaggtcacaagacagttgtcactggagagcagatatgggagatccagaaggatcaacttctatacaatccattcttaaaaatgtgcctttcagcaaatggagagcatccaagtttagtgtcatgcaacccatcagatccactccaaaaatggatacttagccaaaatgattaagtgttccttaaaattaagttgaaaaaggaaatattctttctcataaaactgtgactaggcatacactgtagtttttgaaaattatgcaaaagcagctaaatgtaacttattccaagtgcatttttcttatttatatctttatgtagcactactacagaaattctgcaagtttctgtttcaaagcacaataactagtaataccaaagactatttcaaaatgtccagatgtaggggaagagatgtttacagtatgatgaaaataattttccaagtaaagtgatgtttgtgtgttttgtacacttagggatatatatatatagctacattcacacactcacaatttaaaatatttcccctagttttttggggggataggaagaaagatttgttactgtatttttttaactacataaaaatagatcaataaatgtcagcattggcctctgtgtacaaaccaagagcttttacagatccagaatttattagtttaaaatgcaggtgaacttttttttgcgtttggtttacttgtctgtcaaatgtttccttaaacatgaaactgaataaggagaagagtatttttaacacttaaatttcttggcaaattttaaaacattttttagtctgtaatacactccacttgaagcacttaagtcttccttaaatgacttttcttaagtaatgatactgtgtgttttcccaaagcacttttaaaaaaatttttataaattactatctgttgaaaaggtgtccttttcctttcttctagtatttttttcttaccaaaattcactaatcttgaatgtttgtgatattaaatttcaaatgcagaatacttgactcatttaaagctaaattttgttactgattcaattataattgtaatggatttttgactttgtaatggattcttttcatcaaaaagccttatttttttatctatgtggaaaacacaataaaaaatcctcaacactattgtaa

SEQ ID NO: 7278 - DNA, 7186 bp, Homo sapiens
cttggggacttttcttttctgctttgcaggcccaggctcaaggcaaattataagtagggaaccaatttgagggaaagacatgtgaacagagttaaggtaccacgtcctgggagcgaccagcagccccacctgaagtccgcatgcaactctgacaagctcaggtgcttgttttaaggaaaggggctactagagtcttaccaacagcgagcccaggtgggagatgaaacaggtactccccaaaataggtcatccgagggaggaaaactgatggagagcacaatgtgctctgagcgtttttaatgtttttaagcttttaaatgatttcttcaaggccgagcagcagcagcaaaggtgtggcttaaaggattaagggggtttctgctgacacctagaatgaagttactctattactaatcaagccgagaggaggcccactatgcccccgtttatcatcctttcccagttcctttttgctggtcacaaaacgatgctcatcaatcccacctaaagcaggaggccaggagcccagcctcttgtagaaacagcgagggtataactgccctcccgttctgcccccaagacgaaggaggactctcggaagccaagaaaggtttaagaagtctttctggatagagagcagtgcccaggcaggaagcctttcgccggcagagcggggtccaaggacgagctggagaggacagaggcgcgatgggcctgctgcagggcctgctccgagtccggaagctgctgctggtcgtctgcgtcccgctcctgctgctgcctctgcccgtcctccaccccagcagcgaggcctcgtgtgcttacgtgctgatcgtgactgctgtgtactgggtgtcggaggcagtgcctctgggagctgcagccctggtgccggccttcctttacccgttcttcggagtcctccggtccaatgaggtggcggcggagtacttcaagaacaccacgctgctgctggtgggggtcatctgcgtggcggctgccgtggagaagtggaacctgcataagcgcattgctctgcgcatggtcttgatggccggagccaagccgggcatgctgctgctctgcttcatgtgctgtaccacgttgctgtccatgtggctgtccaacacctccaccaccgccatggtgatgcccatcgtggaggccgtgctgcaggagctggtcagtgctgaggacgagcagctcgtggcgggcaactccaacaccgaagaggccgaacccatcagtacagtttgctggagttcatctctcctttgctcctccaacctcccctggggtcctcctgcctggctcctctagggagactgcccaactttgtgcccaccccaggaccccctcagccatgcccccacattccccttcctcttccctctctcctctttcccatcccagctcttggactctgaagcttccctgaactccctgttctggctcttccttcctccttcacttctgggctcttttcccccaaatgctcaagggtacacactgctctttgcccccaaatgctcaaggatcactgcaaaaccctggggccagtctgcatccatgagccccattctatttacagagcaaagggaaggagaaatgtcacccactccatatggcccacctccgccctaagcccttgagctatgctccaacccacagggtcagccccagcctccacctctcacatactgcttttctttgctactcataggtctggatgtaaagaacagccaaccttctctggaactcatctttgtcaatgaagagtgagtatgactgccctctcccagacagcgcctctcagagtccataggggaggtcagaaaagaggggacctagacccataaacagctctttgagatgtaccacccaagctcaccaccttgccacaccacccccccaccccgcccaacctcccccatttcctctccatacctaggagtgacctgtcaggacctggagagtcactcccttaaccacagtgttgcagtgatgaggaagaaataaaaaggccacactgaatctcagtggatatatgaactgtccacacagccaccatgcagaatctcttctaaattcatgtcccttttaggaaaatagtatgtttaatttgttaacggaaaaccgttcacatctcgatgccactgcagattcttggagaatcatgaaatattttctagatattagataaggtcttggtagatttggtcttgttagatatggcaaagaaaacttaggtgacaggtaggggatgaggggacaggaggtgagagggccttgtgatgatgggaagcagagctggaaaaggagaagcagcctcagacattcctggaggaagctctattaacagctgattccatttggagattctatttcaaaatgtggcccacaggcatgccacaatgaatagtccacatttaaaagctggatttgtaatacagctcagctctgtcatttgcccttgttgtaaaaaaggagaacgcacattgggtgaaatcagcgttcacagtgggacagacgtggaagggtgccatcaggaaatcgctttatttttctccaccactatcttcaatcatagcatattggatttcttgatgacatcacccttgatgatatcccaggcaaatcccgtagctctcctggttcctttcaggtattataacaatctcatgttcagacatttgggagactagtccaaattcaaatcaaaacttcaacttctcagccaaagcttctcccatacccacccacccctcaccctaggcctgcagaagaaagaaggtgaaagtaagtcgggggagggagttgagcttctttctgtcttcctccacctccctcttctcctcctcccctaaccgcaccctcactctgctgcttctgacttttctgggcttaggacagcagctctagggtacaggaaagataaatgggtgagaagggtctggatgggggctattgaggtctggggttggtgccctctctgagatttcagtccctggctctttcatctgtggggcaactgccttcagggtctttggagcatcccattatggcgccctctgcagggcctcaggcctgatggcagggccttgctctgggattaacactcacgccaccctccagggcctgtgctctggtggttaactcccccacaacccctgtattggggctgcctctgcctctgggcaggcctgtcccaggtgacccaggaaaaggccatcctcactgtggccttttctcctccctgtggcctctctggcatcaccctactggcttcttgcctttgctcttttccacacaaaaatgtatccccaaactccaaaagaaaagcctgagttgtccctagaactctaagcatcttttgtgctggtgggaactgggtcatttgctgggtgtgcagacagcactcttgcggccaccacctcccatgctacctgaggatcctcgcctaccctcctcacccagtttgggaagaagggaagggaaacatcacagcacattctcctcccaggctaagaactcactccaaagaacacttccctctgcacgcctgtcagcttcttatccttccctgacagagcctgaagagggaccatggccgcaggacccacatcccgcatgtgtgtgcccaatacgctctctgtcttcacagtggctgagctggtggctcccactgtcctcgcaactaagacaaactggaaacattcactgatcactcagtgtgtcagttacactgatggctaagttctcatcttcttctgtcctcaaggcaaaggttggggaccagcaggggtgggagagactcaccccctgaggtgtacttgctgatcagaagtcctccccctccgccaccctctccctctcccttgactttccctgagtacaatccaggccctccctgctcctgtcacctccgatacgcatatcacaagttcccctttctagatagtggtcttcccagagtcagtcagtgagaacatgagagtcagccagtgagaacatgagagtcagccagtgagaacatggtcagggggcataggctttccagagagacagactcctggactcctaccctcctctgccacttagcatccccgtgctaagtactggtgtaaatggaggtatgaatgccaggaccatagatctgtgatgaggattaacaatgtctgggggttaaagcccatatatgtgcactctgtatctaatatccactccacatctgctgttaggacgattgttaatatcaaaggaaagtgctgcccctgccctcagaaggaagcaggcccctggccccactaatccttacagcatctcagaaggcaaggaagacaagggagagattagtcttctctggagactagaaaactggaatccagagagtttaagtcccttacaccaaacgcctgatgcagggggacctcccctcccaagagtcggcctcactgacgtggctcctgtgtcctctgcttggttccagcaggtccaacgcagacctcaccactctgatgcacaacgaggtatggccttggggtttttctgtgctttggaatcacttgaaaatccctcagcacttcttcatggaaacccaagattcagaaccagattttcaacagctacagatccaccttagagttcctttcagtgaggattccattgacaaaatgttattattaaaaaggacacattggctgggcgtggtggctcatgcctgtactcccagcactttgggaggccacagcaggaggaccacttgaggccaggagttcaagaccagcctggccaacatggtgaaaccccgcctgtactaaaaatacaaaaattagctgggagtggtgatgggcaccggtaatccccactacttgggaggctgaggctggagaatcacttgaacctgggaggcagaggttgcagtgagcccagatcgtgccactgcacttcagcctgggcaacagagcgagacccccatctcaaaaaataaaaataaataaaaataaaaagaacacatttacaggggaaagcagagtttacctgcacacagttactcgaacttatttcacctcccccaaatctggttatacatcttttcatgagaagtataaaaggccaattaaacattggacttcagctgggtacaatgatgtgcacctgtacttccagctactggggaggctgaggcaggaggatcgctgtggcccaggagtttgaccccagcctggacaacacagtgagaccctgtctctaaaacaaacaaaaaactgtggacttgcttgtgattattttttttttattttcttttttttcatcttatatataaagggttcttcattagctaataaagtcccagaaaggctggctctcctctaagggcagagccatgttctgcctagtttcaaagcctcttcaagtggagaacttgacaccaggctgggcggggcaggcctggctgaggtgccctggtgtatatgctccccctggcttctggcctctggttcccacagtgctgaggcatggggtggccctgggatgactaggtggtccttctcgaggcacctggctcaccacttcctcttcctaatagtgagatggcctttgtcccaacagaacctgaatggtgtgccctcgatcaccaaccccatcaaaactgcaaaccaacaccagggcaagaagcaacacccatcccaggaaaagccacaagtcctgacccccagccccaggaagcagaagctgaacagaaagtacaggtcccaccatgaccagatgatctgcaagtgcctctccctgagcatatcctactccgctaccattggcggcctgaccaccatcatcggcacctccaccagcctcatcttcctggaacacttcaacaaccagtatccagccgcagaggtggtgaactttggcacctggttcctcttcagcttccccatatccctcatcatgctggtggtcagctggttctggatgcactggctgttcctgggctgcaattttaaagagacctgctctctgagcaagaagaagaagaccaaaagggaacagttgtcagagaagaggatccaagaagaatatgaaaaactgggagacattagctacccagaaatggtgactggatttttcttcatcctgatgaccgtactgtggtttacccgggagcctggctttgtccctggctgggattctttctttgaaaagaaaggctaccgtactgatgccacagtctctgtcttccttggcttcctcctcttcctcattccagcgaagaagccctgctttgggaaaaagaatgatggagagaaccaggagcactcactggggaccgagcccatcatcacgtggaaggacttccagaagaccatgccctgggagattgtcattctggttgggggaggctatgctctggcttctggtagcaagagctctggcctctctacatggattgggaaccagatgttgtccctgagcagcctcccaccgtgggctgtcaccctgctggcatgcatcctcgtgtccattgtcactgagtttgtgagcaacccagcaaccatcaccatcttcctgcccatcctgtgcagcctgtctgaaacgctgcacattaaccccctctacaccctgatcccagtcaccatgtgcatctcctttgcagtgatgctgcctgtgggcaatccccctaatgccatcgtcttcagctatgggcactgccagatcaaagatatggtgaaagctggcctgggagtcaacgttattggactggtgatagtaatggtggccatcaacacctggggagttagcctcttccacctggacacttacccagcatgggcgagggtcagcaacatcactgatcaagcctaacgccaagtgtacaaactggcccaaccacaggagctgccagtatccagcagtatctggaccacaggcaaagaaaaccactaggaccaccaggagcacacaaccccagacccacgccggagggcatccctccaccagaagattccgccacctcaagtgaactgcaggaatcctccaacaaccacaaacacatgcttcgctgttagtgtcttcttcctgccctcagcaccacagctcaagaaaacctaaagtttcaatacaagccataggctcacagaaaaagaaaaagaaaataaaaattaaattaaaaaaaaagaagacaaag

SEQ ID NO: 7279 - DNA, 1406 bp, Homo sapiens
ataggctcagacacaaggagaggcttggagagagcagacgccttctggattcaagaagacgaggctcacctgttactcggcctcccagaaagatggataggagaaatgactacggatatagggtgcctctatttcagtccaagcatctgaatggggatgagagaagtggcagtaattacaggcggatcccatggggccggaggcctgcaccaccgcgagatgtggccattttacaagaaagggctaataagttggtgaaatacctgttggttaaggaccagacaaagatccccatcaaacgctcagacatgctgagggatgtcatccaagaatatgatgaatatttcccagaaatcattgaacgagcaagctacactctggagaagatgtttcgagtcaatctgaaagaaattgataagcaaagtagcttgtatattctcatcagcactcaggaatcctctgcaggcatactgggaacgaccaaggacacacccaagctgggtctcctcatggtgattctgagtgtcatttttatgaatggcaacaaggccagtgaggctgtcatctgggaggtgctgcgcaagttggggctgcgccctggggtgaggcattcactctttggggaagtgaggaagctcatcacagacgagtttgtgaagcagaagtacctggagtacaagagggtccctaacagcagaccacctgaatatgagttcttctggggcttgcgctcctaccacgagactagcaagatgaaagtcctcaagtttgcatgcagggtgcagaagaaagaccccaaggactgggctgtgcagtaccgcgaggcagtggagatggaagtccaagctgcagctgtggctgtggctgaggctgaagccagggctgagtggttccaacaccagcactggctttactggcgaacccagcaccagcacgggcttcagtagtggacccagttctattgttggcttcagcggtggaccaagcactggtgttggcttctgcagtggaccaagcaccagtggcttcagcggtggaccgagcacaggagctggcttcggcggtggaccaaacactggtgctggctttggtggtggaccgagcaccagtgctggctttggcagtggagccgccagtcttggtgcctgtggcttctcgtatggctagtgaggtttcagatttattccccatgtttacagataccgctaataaattgcagtagtccttcccatggagccaaagtacatccttggaatctttgtccacacagcagtcaaggcagttatggccaatcagctgagggtgtcatgtgatggaaaaatctgtttgctgttcctgctttattgtttgctttctgtgtgctgtcatattttggtatcagagttacattaaatttgcaaaatgaa

SEQ ID NO: 7280 - DNA, 7759 bp, Homo sapiens
cccgcgccggctgtgctgcacagggggaggagagggaaccccaggcgcgagcgggaagaggggacctgcagccacaacttctctggtcctctgcatcccttctgtccctccacccgtccccttccccaccctctggcccccaccttcttggaggcgacaacccccgggaggcattagaagggatttttcccgcaggttgcgaagggaagcaaacttggtggcaacttgcctcccggtgcgggcgtctctcccccaccgtctcaacatgcttaggggtccggggcccgggctgctgctgctggccgtccagtgcctggggacagcggtgccctccacgggagcctcgaagagcaagaggcaggctcagcaaatggttcagccccagtccccggtggctgtcagtcaaagcaagcccggttgttatgacaatggaaaacactatcagataaatcaacagtgggagcggacctacctaggcaatgcgttggtttgtacttgttatggaggaagccgaggttttaactgcgagagtaaacctgaagctgaagagacttgctttgacaagtacactgggaacacttaccgagtgggtgacacttatgagcgtcctaaagactccatgatctgggactgtacctgcatcggggctgggcgagggagaataagctgtaccatcgcaaaccgctgccatgaagggggtcagtcctacaagattggtgacacctggaggagaccacatgagactggtggttacatgttagagtgtgtgtgtcttggtaatggaaaaggagaatggacctgcaagcccatagctgagaagtgttttgatcatgctgctgggacttcctatgtggtcggagaaacgtgggagaagccctaccaaggctggatgatggtagattgtacttgcctgggagaaggcagcggacgcatcacttgcacttctagaaatagatgcaacgatcaggacacaaggacatcctatagaattggagacacctggagcaagaaggataatcgaggaaacctgctccagtgcatctgcacaggcaacggccgaggagagtggaagtgtgagaggcacacctctgtgcagaccacatcgagcggatctggccccttcaccgatgttcgtgcagctgtttaccaaccgcagcctcacccccagcctcctccctatggccactgtgtcacagacagtggtgtggtctactctgtggggatgcagtggctgaagacacaaggaaataagcaaatgctttgcacgtgcctgggcaacggagtcagctgccaagagacagctgtaacccagacttacggtggcaactcaaatggagagccatgtgtcttaccattcacctacaatggcaggacgttctactcctgcaccacagaagggcgacaggacggacatctttggtgcagcacaacttcgaattatgagcaggaccagaaatactctttctgcacagaccacactgttttggttcagactcgaggaggaaattccaatggtgccttgtgccacttccccttcctatacaacaaccacaattacactgattgcacttctgagggcagaagagacaacatgaagtggtgtgggaccacacagaactatgatgccgaccagaagtttgggttctgccccatggctgcccacgaggaaatctgcacaaccaatgaaggggtcatgtaccgcattggagatcagtgggataagcagcatgacatgggtcacatgatgaggtgcacgtgtgttgggaatggtcgtggggaatggacatgcattgcctactcgcagcttcgagatcagtgcattgttgatgacatcacttacaatgtgaacgacacattccacaagcgtcatgaagaggggcacatgctgaactgtacatgcttcggtcagggtcggggcaggtggaagtgtgatcccgtcgaccaatgccaggattcagagactgggacgttttatcaaattggagattcatgggagaagtatgtgcatggtgtcagataccagtgctactgctatggccgtggcattggggagtggcattgccaacctttacagacctatccaagctcaagtggtcctgtcgaagtatttatcactgagactccgagtcagcccaactcccaccccatccagtggaatgcaccacagccatctcacatttccaagtacattctcaggtggagacctaaaaattctgtaggccgttggaaggaagctaccataccaggccacttaaactcctacaccatcaaaggcctgaagcctggtgtggtatacgagggccagctcatcagcatccagcagtacggccaccaagaagtgactcgctttgacttcaccaccaccagcaccagcacacctgtgaccagcaacaccgtgacaggagagacgactcccttttctcctcttgtggccacttctgaatctgtgaccgaaatcacagccagtagctttgtggtctcctgggtctcagcttccgacaccgtgtcgggattccgggtggaatatgagctgagtgaggagggagatgagccacagtacctggatcttccaagcacagccacttctgtgaacatccctgacctgcttcctggccgaaaatacattgtaaatgtctatcagatatctgaggatggggagcagagtttgatcctgtctacttcacaaacaacagcgcctgatgcccctcctgacacgactgtggaccaagttgatgacacctcaattgttgttcgctggagcagaccccaggctcccatcacagggtacagaatagtctattcgccatcagtagaaggtagcagcacagaactcaaccttcctgaaactgcaaactccgtcaccctcagtgacttgcaacctggtgttcagtataacatcactatctatgctgtggaagaaaatcaagaaagtacacctgttgtcattcaacaagaaaccactggcaccccacgctcagatacagtgccctctcccagggacctgcagtttgtggaagtgacagacgtgaaggtcaccatcatgtggacaccgcctgagagtgcagtgaccggctaccgtgtggatgtgatccccgtcaacctgcctggcgagcacgggcagaggctgcccatcagcaggaacacctttgcagaagtcaccgggctgtcccctggggtcacctattacttcaaagtctttgcagtgagccatgggagggagagcaagcctctgactgctcaacagacaaccaaactggatgctcccactaacctccagtttgtcaatgaaactgattctactgtcctggtgagatggactccacctcgggcccagataacaggataccgactgaccgtgggccttacccgaagaggacagcccaggcagtacaatgtgggtccctctgtctccaagtacccactgaggaatctgcagcctgcatctgagtacaccgtatccctcgtggccataaagggcaaccaagagagccccaaagccactggagtctttaccacactgcagcctgggagctctattccaccttacaacaccgaggtgactgagaccaccattgtgatcacatggacgcctgctccaagaattggttttaagctgggtgtacgaccaagccagggaggagaggcaccacgagaagtgacttcagactcaggaagcatcgttgtgtccggcttgactccaggagtagaatacgtctacaccatccaagtcctgagagatggacaggaaagagatgcgccaattgtaaacaaagtggtgacaccattgtctccaccaacaaacttgcatctggaggcaaaccctgacactggagtgctcacagtctcctgggagaggagcaccaccccagacattactggttatagaattaccacaacccctacaaacggccagcagggaaattctttggaagaagtggtccatgctgatcagagctcctgcacttttgataacctgagtcccggcctggagtacaatgtcagtgtttacactgtcaaggatgacaaggaaagtgtccctatctctgataccatcatcccagaggtgccccaactcactgacctaagctttgttgatataaccgattcaagcatcggcctgaggtggaccccgctaaactcttccaccattattgggtaccgcatcacagtagttgcggcaggagaaggtatccctatttttgaagattttgtggactcctcagtaggatactacacagtcacagggctggagccgggcattgactatgatatcagcgttatcactctcattaatggcggcgagagtgcccctactacactgacacaacaaacggctgttcctcctcccactgacctgcgattcaccaacattggtccagacaccatgcgtgtcacctgggctccacccccatccattgatttaaccaacttcctggtgcgttactcacctgtgaaaaatgaggaagatgttgcagagttgtcaatttctccttcagacaatgcagtggtcttaacaaatctcctgcctggtacagaatatgtagtgagtgtctccagtgtctacgaacaacatgagagcacacctcttagaggaagacagaaaacaggtcttgattccccaactggcattgacttttctgatattactgccaactcttttactgtgcactggattgctcctcgagccaccatcactggctacaggatccgccatcatcccgagcacttcagtgggagacctcgagaagatcgggtgccccactctcggaattccatcaccctcaccaacctcactccaggcacagagtatgtggtcagcatcgttgctcttaatggcagagaggaaagtcccttattgattggccaacaatcaacagtttctgatgttccgagggacctggaagttgttgctgcgacccccaccagcctactgatcagctgggatgctcctgctgtcacagtgagatattacaggatcacttacggagagacaggaggaaatagccctgtccaggagttcactgtgcctgggagcaagtctacagctaccatcagcggccttaaacctggagttgattataccatcactgtgtatgctgtcactggccgtggagacagccccgcaagcagcaagccaatttccattaattaccgaacagaaattgacaaaccatcccagatgcaagtgaccgatgttcaggacaacagcattagtgtcaagtggctgccttcaagttcccctgttactggttacagagtaaccaccactcccaaaaatggaccaggaccaacaaaaactaaaactgcaggtccagatcaaacagaaatgactattgaaggcttgcagcccacagtggagtatgtggttagtgtctatgctcagaatccaagcggagagagtcagcctctggttcagactgcagtaaccactattcctgcaccaactgacctgaagttcactcaggtcacacccacaagcctgagcgcccagtggacaccacccaatgttcagctcactggatatcgagtgcgggtgacccccaaggagaagaccggaccaatgaaagaaatcaaccttgctcctgacagctcatccgtggttgtatcaggacttatggtggccaccaaatatgaagtgagtgtctatgctcttaaggacactttgacaagcagaccagctcagggagttgtcaccactctggagaatgtcagcccaccaagaagggctcgtgtgacagatgctactgagaccaccatcaccattagctggagaaccaagactgagacgatcactggcttccaagttgatgccgttccagccaatggccagactccaatccagagaaccatcaagccagatgtcagaagctacaccatcacaggtttacaaccaggcactgactacaagatctacctgtacaccttgaatgacaatgctcggagctcccctgtggtcatcgacgcctccactgccattgatgcaccatccaacctgcgtttcctggccaccacacccaattccttgctggtatcatggcagccgccacgtgccaggattaccggctacatcatcaagtatgagaagcctgggtctcctcccagagaagtggtccctcggccccgccctggtgtcacagaggctactattactggcctggaaccgggaaccgaatatacaatttatgtcattgccctgaagaataatcagaagagcgagcccctgattggaaggaaaaagacaggacaagaagctctctctcagacaaccatctcatgggccccattccaggacacttctgagtacatcatttcatgtcatcctgttggcactgatgaagaacccttacagttcagggttcctggaacttctaccagtgccactctgacaggcctcaccagaggtgccacctacaacgtcatagtggaggcactgaaagaccagcagaggcataaggttcgggaagaggttgttaccgtgggcaactctgtcaacgaaggcttgaaccaacctacggatgactcgtgctttgacccctacacagtttcccattatgccgttggagatgagtgggaacgaatgtctgaatcaggctttaaactgttgtgccagtgcttaggctttggaagtggtcatttcagatgtgattcatctagatggtgccatgacaatggtgtgaactacaagattggagagaagtgggaccgtcagggagaaaatggccagatgatgagctgcacatgtcttgggaacggaaaaggagaattcaagtgtgaccctcatgaggcaacgtgttatgatgatgggaagacataccacgtaggagaacagtggcagaaggaatatctcggtgccatttgctcctgcacatgctttggaggccagcggggctggcgctgtgacaactgccgcagacctgggggtgaacccagtcccgaaggcactactggccagtcctacaaccagtattctcagagataccatcagagaacaaacactaatgttaattgcccaattgagtgcttcatgcctttagatgtacaggctgacagagaagattcccgagagtaaatcatctttccaatccagaggaacaagcatgtctctctgccaagatccatctaaactggagtgatgttagcagacccagcttagagttcttctttctttcttaagccctttgctctggaggaagttctccagcttcagctcaactcacagcttctccaagcatcaccctgggagtttcctgagggttttctcataaatgagggctgcacattgcctgttctgcttcgaagtattcaataccgctcagtattttaaatgaagtgattctaagatttggtttgggatcaataggaaagcatatgcagccaaccaagatgcaaatgttttgaaatgatatgaccaaaattttaagtaggaaagtcacccaaacacttctgctttcacttaagtgtctggcccgcaatactgtaggaacaagcatgatcttgttactgtgatattttaaatatccacagtactcactttttccaaatgatcctagtaattgcctagaaatatctttctcttacctgttatttatcaatttttcccagtatttttatacggaaaaaattgtattgaaaacacttagtatgcagttgataagaggaatttggtataattatggtgggtgattattttttatactgtatgtgccaaagctttactactgtggaaagacaactgttttaataaaagatttacattcca

SEQ ID NO: 7281 - DNA, 2842 bp, Homo sapiens
agtaggctccaaggagaagagaggagaggagaggagagctgaacagggagccacgtcttttcctgggagggctgctatctaagtcggggctgcaggttggagatttttaaggaagtggaaattggcaattggctttgtgtgtctgtggtttttggggagggggactacaaagaggggctaactccctctccctattctctaaggttggaccacagggatgaggttgtgagatacaaagataaaggagggatggggaacactatgatgtggtatttttcttttctgttttttctttttgataatatctatccttggctaaggggagggcggagttcagcggcggaaataaagcgagcagtggctggtgcgaaccgactcccggctctaagccttacttgcggtggccggacttgtctgtggctgaagccgagcccgggctctgactctcacgtctgcactggaggtgcggaaacctggactggggttcaccagccacatactggctgctctggttgttctctcctcttccttcttctattctaaccaaacaaaacccaactcgatgcttgtgccaggccttggccagtttggacggtgatggaaacatttctggattttagcgtctaagggagcactcaagggctgtaaggtttgctatcactgtcccaacactgcagagaccttgaaggttcagtgtgggatctgtagaacccatggtttgcggtgacactcagaggggatctttgggagatttatagagccggttcttagcgctttgtgggttcagaggctggctgcagtgtttatgaagaggggcagtgggctggggacactgctggggttatggctgtagtgaggtccatgtgtacttgttccttggcatgtgtctgactctgtgttgctgctgcagtacagtgggcaggggcacggttgcttggactgggctgcccgatgtctggcatggctggtggtcctgttgtcctttatttgatcgatagcagggaactgaccgccgaggttggcacaggttggcagggggatgaggatgcattgtggttgtctcctcctcctctccttcttcctcttccccttcctcctctcctttctgttcttgttctccctcatcttcctcttccttcttctccctcttcttcctcttcactctgctctcttctcttcttttcccctttcctctcctctccctttcctcaggtcacagcggagtgaatcagctcggtggtgtctttgtcaacgggcggccactgccggactccacccggcagaagattgtagagctagctcacagcggggcccggccgtgcgacatttcccgaattctgcagacccatgcagatgcaaaagtccaagtgctggacaatcaaaacgtgtccaacggatgtgtgagtaaaattctgggcaggtattacgagactggctccatcagacccagggcaatcggtggtagtaaaccgagagtagcgactccagaagttgtaagcaaaatagcccagtataagcgggagtgcccgtccatctttgcttgggaaatccgagacagattactgtccgagggggtctgtaccaacgataacataccaagcgtaagttcattgagaacatctgccctccctgccctaagcccaatgctctctcctctttacctcctcccaccctctctctccactgtctcttagtctgtgtcctctccctgctccacatttgtctcctttgtacctgggggaacagagaggaatgccctgacttttctttgactgtctggaaaatgggagtcaagtgtggggagtcattcacttcatttgcatgctgcaaaacagagggcggaggcaccagggaaaggcacttgaatgaagaaggaaaatgagaaccagattgtaacttcgtcctaatccacctgccagaactttccttcaggtgtcatcaataaacagagttcttcgcaacctggctagcgaaaagcaacagatgggcgcagacggcatgtatgataaactaaggatgttgaacgggcagaccggaagctggggcacccgccctggttggtatccggggacttcggtgccagggcaacctacgcaagatggctgccagcaacaggaaggagggggagagaataccaactccatcagttccaacggagaagattcagatgaggctcaaatgcgacttcagctgaagcggaagctgcaaagaaatagaacatcctttacccaagagcaaattgaggccctggagaaagagtttgagagaacccattatccagatgtgtttgcccgagaaagactagcagccaaaatagatctacctgaagcaagaatacaggtatggttttctaatcgaagggccaaatggagaagagaagaaaaactgaggaatcagagaagacaggccagcaacacacctagtcatattcctatcagcagtagtttcagcaccagtgtctaccaaccaattccacaacccaccacaccggtttcctccttcacatctggctccatgttgggccgaacagacacagccctcacaaacacctacagcgctctgccgcctatgcccagcttcaccatggcaaataacctgcctatgcaacccccagtccccagccagacctcctcatactcctgcatgctgcccaccagcccttcggtgaatgggcggagttatgatacctacacccccccacatatgcagacacacatgaacagtcagccaatgggcacctcgggcaccacttcaacaggactcatttcccctggtgtgtcagttccagttcaagttcccggaagtgaacctgatatgtctcaatactggccaagattacagt

SEQ ID NO: 7282 - DNA, 2223 bp, Homo sapiens
gttgtccaaagtcattccggctccaaagggcgaattctcttttcgccatctctcccagccctggaacagcttagggtccctctcgaagagcacagcgccagcccagaccccatacacccaccgtccctggcacccgaacgcgctgcgagccccgggcctcccacaggagcggagacgcgggtccctgcgcctcacgccggaacggacccgtcagagccgccgagccccgcacctggaagctgggaggccgcgaggacggagaatcgaggcggagacccagcccagcgcccgcgcagctcggtgccctcccgccagtgcccgcactcgggtcacaccgcttgctctcgggagaagccccaaggctcgcggtgcaccgagaggcgcccgggctggagcgccccggccgtgttggccacggagttcttcagctgcttgatgaccacgaagagcaggaggaaaagtaagaagagcaggaagaagaagagcgccaggtagagcagcaagttgagttcccactccatgctggaggcgccggcgctcgctggccctgcgcgctcggcgcgggctgcagctggagggcgagcgcgccgcccgcacacccacctcccgcactcccgcccctcgcgagggcgtcccgctatgggcgccgactccggggtccgtgctttgcctcccccggctccgaggaaacgcgccaaggagctgaggaaatccggcgcagactctcccagctggcaccaaagccttccgcttcgccgagatcctctcaggtgctcttgaggacgcgagcgacttccctaggagcgaacttccgcgggcacggacgccagaagaggtaacagctcagtcttccaggggaggtcgggactggtgttttgtaaatgatttaaaagttccacccccaacatccagtagggtccctagctccgctgcgttcccaattaatttatttcgttatatccctccgttcctgctttccgaaaggacaggggatgtcatggcccagagacccaaaagaatgaaaggtggcagtgaagatggggtctgaaaggctatgagatgatttcgtgctatgaggtgtctgagtgaattccagttcgagctgtcttgctcttcagagtagcagatacattcagtgttgagtgtacttttctatggacaacaggtcacttggaaacgcattaagaatacaatgtatttcagaagttatatagcacaaagatttcaaatattggcctcaaattcagtttatttggtgaaaagaggaaaacaagtttactcaaagtgtttcttgagtccctaaagcctttctgtatctggttgacgtgacccaaagcccatatcgcgcagctttaaaagctgttcagtgtatctattactgcagaacaaattacccccaaatttagtggcttcaaacagcataaacattgatcatctctcacagtttctgtgggtccgaaatgtgggagcactggctgggtgattctggtgtcgggttactcatgaggctccgttcagatgtcagccaggtctgccttcagctgaatgcttgtgtagaggtggaggatccacttccagggtggctcactcactgcttgccaggtagggctggttgttggtgggaggcctcagttcccttccatgggtgcttccaatacagctgcgggattcccccagaacaagtgatgaaagaaaacaaagcagaggctgcagtgctctttaccgccagcttcagaagtcacgtgccatcagatctgtaatatcctactggtcacacaggtcagccctattcagggtaggagtccaaggacacgaacgccaaggagtaaggatcactggggctcatcttagagtcggctatgacagctgttaatacagccagctatcattgcccatttgtaggcctaactttattttattctttatttgtgaagatgcagaattgcctcctggactgaattctggggatgagggctgacaacatcccagattgtaataagtggctgctccagggatgacaggggttcaaagagacagggtggtatgaaaacagtctgtgaactgcaagtctcatggacccgattctagtgtcagctctgtcagtggtcacttttgctcagtgactctcagtcccctcatctgtaacatgccttgcttatctttcccttggatttgttgtgaggctcaaaaatgagaaaatgttaaataaaaatgtgttttgct

SEQ ID NO: 7283 - DNA, 698 bp, Homo sapiens
tccctcgcctccggaggcggcgaggagcggcgggtgagccccggagcactgggcgagggccagggggtccccgcgctgccctgaaggcgggcgggcggcggctagacctcggcggtggggagggacccctggcgcctgcggcgacggtgggacgagggcgtctctgtcagaaggggatgaggtctggcgtgggaacgcgagttccggggctcccgggggtccgtatgcgtccagtccctgcgcctggcgctcagcgaagtcctgtagcacgggaacctaaattggtaataaatcaataagaaatatttacattcactcagtgaaaagtgtcatgtctgagctcagcatatatcggagccacacatggacacctctccttcctccactaagagcggaaaatgaacaaatcccaggaacaagtgtcattcaaggatgtatgtgtggacttcactcaggaagagtggtatctgctggaccctgctcagaagattctatacagagatgtgatcctggaaaattatagcaatcttgtctcagtagggtattgcattactaaaccagaagtgatctttaagatcgagcaaggagaagagccctggatattagaaaaaggattcccaagccagtgccacccagaaaggaaatggaaagttgatgacgtgttagagagcagccaggaaaatgaagatgaccatttt

SEQ ID NO: 7284 - DNA, 5887 bp, Homo sapiens
agtctgcagccgagcagctaaagggagaaagaatcgctcaggaaagacacactgcagactccaccggcaccctgcaatagatggattccgactacacaagggagaaaacgcggaggtgacactctcctgcctggaaagaggacgaacgaccaaacaaacgcaaggactggactccatgccgaaggtatctggaagtcgtgacacggtgtgtataaaacaaaagtttgcgagctgttaattgctgtgctgtgttattaagagacgctttcaagtttcaagtaccaaatgtagctttacgttgccaaaggaagttgaggcaattgctttgctgttttaacttgctctgtgagggaaatctcataaactgaccaatgcaccaaatgaatgctaaaatgcactttaggtttgtttttgcacttctgatagtatctttcaaccacgatgtactgggcaagaatttgaaatacaggatttatgaggaacagagggttggatcagtaattgcaagactatcagaggatgtggctgatgttttattgaagcttcctaatccttctactgttcgatttcgagccatgcagaggggaaattctcctctacttgtagtaaacgaggataatggggaaatcagcataggggctacaattgaccgtgaacaactgtgccagaaaaacttgaactgttccatagagtttgatgtgatcactctacccacagagcatctgcagcttttccatattgaagttgaagtgctggatattaatgacaattctccccagttttcaagatctctcatacctattgagatatctgagagtgcagcagttgggactcgcattcccctggacagtgcatttgatccagatgttggggaaaattccctccacacatactcgctctctgccaatgatttttttaatatcgaggttcggaccaggactgatggagccaagtatgcagaactcatagtggtcagagagttagatcgggagctgaagtcaagctacgagcttcagctcactgcctcagacatgggagtacctcagaggtctggctcatccatactaaaaataagcatttcagactccaatgacaacagccctgcttttgagcagcaatcttatataatacaactcttagaaaactccccggttggcactttgctcttagatctgaatgccacggatccagatgagggcgctaatgggaaaattgtatattccttcagcagtcatgtgtctcccaaaattatggagacttttaaaattgattctgaaagaggacatttgactcttttcaagcaagtggattatgaaatcaccaaatcctatgagattgatgttcaggctcaagatttgggtccaaattcaatcccagcccattgcaaaattataattaaggttgtggatgttaatgacaataaacctgaaattaacatcaacctcatgtcccctggaaaagaagaaatatcttatatttttgaaggggatcctattgatacatttgttgctttggtcagagttcaggacaaggattctgggctgaatggagaaatagtttgtaagcttcatggacatggtcactttaaacttcagaagacatatgaaaacaattatttaatcttaactaatgccacactggatagagaaaagagatctgagtatagtttgactgtaatcgctgaggacagggggacacccagtctctctacagtgaaacattttacagttcaaatcaatgatatcaatgacaatccaccccacttccagagaagccgatatgaatttgtaatttcagaaaataactcaccaggggcatatatcaccactgttacagccacagatcctgatcttggagaaaatgggcaagtgacatacaccatcttggagagttttattctaggaagttccataactacatatgtaaccattgacccatctaatggagccatctatgccctcagaatctttgatcatgaagaagtgagtcagatcacttttgtggtagaagcaagagatggaggaagcccgaagcaactggtaagcaataccacagttgtgctcaccatcattgacgaaaatgacaacgttcctgtggttatagggcctgcattgcgtaataatacggcagaaatcaccattcccaaaggggctgaaagtggctttcatgtcacaagaataagggcaattgacagagactctggtgtgaatgctgaactcagctgcgccatagtagcaggtaatgaggagaatatcttcataattgatccacgatcatgtgacatccataccaacgttagcatggattctgttccctacacagaatgggagctgtcagttatcattcaggacaaaggcaatcctcagctacataccaaagtccttctgaagtgcatgatctttgaatatgcagagtcggtgacaagtacagcaatgacttcagtaagccaggcatccttggatgtctccatgataataattatttccttaggagcaatttgtgcagtgttgctggttattatggtgctatttgcaactaggtgtaaccgcgagaagaaagacactagatcctataactgcagggtggccgaatcaacttaccagcaccacccaaaaaggccatcccggcagattcacaaaggggacatcacattggtgcctaccataaatggcactctgcccatcagatctcatcacagatcgtctccatcttcatctcctaccttagaaagagggcagatgggcagccggcagagtcacaacagtcaccagtcactcaacagtttggtgacaatctcatcaaaccacgtgccagagaatttctcattagaactcacccacgccactcctgctgttgaggtctctcagcttctttcaatgcttcaccaggggcaatatcagccaagaccaagttttcgaggaaacaaatattccaggagctacagatatgcccttcaagacatggacaaatttagcttgaaagacagtggccgtggtgacagtgaggcaggagacagtgattatgatttggggcgagattctccaatagataggctgttgggtgaaggattcagcgacctgtttctcacagatggaagaattccagcagctatgagactctgcacggaggagtgcagggtcctgggacactctgaccagtgctggatgccaccactgccctcaccgtcttctgattataggagtaacatgttcattccaggggaagaattcccaacgcaaccccagcagcagcatccacatcagagtcttgaggatgacgctcagcctgcagattccggtgaaaagaagaagagtttttccacctttggaaaggactccccaaacgatgaggacactggggataccagcacatcatctctgctctcggaaatgagcagtgtgttccagcgtctcttaccgccttccctggacacctattctgaatgcagtgaggtggatcggtccaactccctggagcgcaggaagggacccttgccagccaaaactgtgggttacccacagggggtagcggcatgggcagccagtacgcattttcaaaatcccaccaccaactgtgggccgccacttggaactcactccagtgtgcagccttcttcaaaatggctgccagccatggaggagatccctgaaaattatgaggaagatgattttgacaatgtgctcaaccacctcaatgatgggaaacacgaactcatggatgccagtgaactggtggcagagattaacaaactgcttcaagatgtccgccagagctaggagattttagcgaagcatttttgtttccatgtatatggaaatagggaacaacaacaacaacaaaaaaccctgaaagaactggcattgccaaatagttgcatttatcataaatgtgtctgtgtatattgaatattaaatactgtattttcgtatgtacacaatgcaagtgtgattattttaatctgtattttaaaaatacatttgtaccttatatttatgtgtaatttaacaaacaaattttatttttttactcccatgacagacatgtttttcctagtcgtgtagaaactagccactgttcaaatctgatacactattcaaccacaaagtgtaaaggcactgcttagattagttttgttggggaagaattattatgttgtatgaacaaccccactgaagcattatacaattcttaattccattaagtgatcccactttttttcaataactttttagaaattaagaatcattaaaattgttaagctattttattgttattttctctactttctactagccccaatagttgaactcttataggaaaatcgaaagataaagtgaaagtttatttcaggactgagaaatatcttgaaggttatttattagatgactatctcaaatgaactttttatagacaatgatgaaaacagaattaaagtcaatgtttcctgactcccaggcccctactattccaggccatcacactggcctgttccggagaatatttctctcacaatattattatctacttataattatggtaaacaataaattttattccatccttgtagtatgaaacatgctccaaggaaatggaatctgtcctttaaatggataacagtatgtgttctaatggcataaaatattactggataaaaacagttgtgtcagtgtctctcctaaggtagtaaatataattgacttattctgaacccattctattttgaatctcccctttcctctcacaatacttgaacattttaatcttttggaatattgtctttctttgttataactattcatttttagcttttgtctccagtgcatgatctcatatttttgcttttatttttagtataagaacatttataaaatcatatttttgttactgcaattgttttatttgttgtgtggcaaatgagaaatcctttatttattgtgctgtgatctctctgtgtggaatgccttggtgagagagatgcttattatgactattatcatttctgaccaagcttctattaatgttatttctaataatacactatcttgattgtactctccagaaaatttttctgtcagtgaaaataaaagaaaaattaaagtaaagctaaggaactgtctataagtcagagtcctgttcctacatatttgttcaaaagcttggcatgcagcaggcccttcctgagcgggtgattcagtgttgagtttcaaataataaacaggcagcattcagttggctgggcgaacaagaaaaacacaatggaaaaggaatgagtttgagacttgtaatgggaatgaaagtagtaagccatattccagctaaataagttaaatgcatttggggaataaagaaaaaagagtaagcaagcaataattgcttgaatatttttcaaattacaacaaaaaaaaatactttcttaggacattttgtattaaattgtgcaggataaaaaggtatccttacaatgtttccaggaggcaagaatattatcgtccctggcttgctagtcaggaattgaaacactgggaaagttaagtaactgaaaagtgactaaaattcagatatttgaattctcaaatgagtaccacattaaatagaatatattacctctttcaacaggcacattttcctttataggagagattgcaattacaagtgaaatttcagtatatttttcagtagattacacacacaaacgctaaccatatttaaatgcattctgcctttcaacttcacttcctttcagtatatattaccattaagaaaaagacttttatatcctcactgttcttaatttaaagcaccagcagtaatatgggaagctatgctgaaaaccgctattttgaataatgtgaaataaataaaatgcaatatttcattcaacacaaaa

SEQ ID NO: 7285 - DNA, 5141 bp, Homo sapiens
ggggctgcgggggagagcgactgcgccaggtccgcgacaaatgaattagacacaattatccacgggagactcggttttcctctctgtaaattacggatattaggaatacttgccgcctggggttgttttgagcactttcattgtttaggtgctgtatttattgggtgtgcgttccctgggagagcccgagggagacggctcctgcaccggccccaagggcctctctgcccgtggagtgcaggagcgaaggggctggcctagctgaccaccagggcccctgctggctctgaccgccctcctatcccaagtaattatttacacgtttcgcgttcgcttatgtattatgtgtaatcatggcacagtatcctgaagccgtcggagtctgtgtgctggtgcaaggtctgggacaaatttaagaagagagagaacctaaattggtaataaatcaataagaaatatttacattcactcagtgaaaagtgtcatgtctgagctcagcatatatcggagccacacatggacacctctccttcctccactaagagcggaaaatgaacaaatcccaggaacaagtgtcattcaaggatgtatgtgtggacttcactcaggaagagtggtatctgctggaccctgctcagaagattctatacagagatgtgatcctggaaaattatagcaatcttgtctcagtagggtattgcattactaaaccagaagtgatctttaagatcgagcaaggagaagagccctggatattagaaaaaggattcccaagccagtgccacccagaaaggaaatggaaagttgatgacgtgttagagagcagccaggaaaatgaagatgaccatttttgggagcttctattccacaacaacaaaacagtaagtgtagaaaatggagatagaggaagcaaaactttcaatttgggcacagaccctgtttctttaagaaattatccctataaaatatgtgactcatgtgaaatgaatttgaaaaatatttcgggcttaattattagtaaaaagaactgttccagaaagaagcctgatgagtttaatgtatgtgagaaattgctccttgatattaggcatgagaaaatccctattggagagaagtcttataaatatgatcaaaaaaggaatgccattaattatcaccaggatctcagtcagccaagttttggccaatcttttgagtatagtaaaaatggacaaggcttccatgatgaggcagcattttttacaaataagagatctcagataggagagacagtctgtaaatataacgaatgtggaagaaccttcattgaaagtttaaagctgaatatatctcaaagacctcatttggaaatggagccgtatggatgcagtatttgcgggaagtccttctgcatgaatttaaggtttggacatcagagagctcttacaaaggacaatccttatgaatataatgaatatggggaaatcttctgtgacaattcagctttcattatccatcagggagcttacacaagaaagattctccgtgaatataaagtgagtgacaaaacctgggaaaagtcagctctcttaaaacatcaaatagtacacatggggggaaagtcttatgattacaatgaaaatgggagtaatttcagcaagaagtcacatcttacccagcttcggagagctcacacaggagaaaaaacctttgaatgtggtgaatgtgggaaaaccttctgggagaagtcaaacctcactcaacatcagagaacacacacaggagagaagccctatgaatgtactgaatgtgggaaagccttttgccagaaaccacacctgaccaaccatcagcgaacacatacaggagaaaaaccctatgaatgtaagcaatgtggaaaaacattctgtgtgaagtcaaacctcactgaacatcagagaacacacacaggggagaagccctatgaatgtaatgcatgtgggaaatccttctgccacagatcagccctcactgtgcatcagagaacacacacaggggagaaaccgtttatatgtaatgaatgtggaaaatccttctgtgtgaagtcaaacctcattgtacatcaaagaactcacactggggagaaaccatataagtgtaatgaatgtgggaaaaccttctgtgaaaaatcagctctcactaaacatcagaggactcacacaggggagaagccgtatgagtgtaatgcatgtgggaagacctttagtcagaggtcagtgctcaccaaacatcagagaattcacacaagggtgaaagctctttcaacatcctgaatgttagaagccttcatacacttgtgaaattggttatacagtttcaaaaaaggagatcagagaaagccaaagaatgtcagaaatttgtagaaaatgacttcttgtttgaatatgtaaaagctttcaagaaaaattaaaacttttcattagaaaatttgtactgaggggaattctattcatctaagtaatatggtgaaaatatttatctggaatttatgttgtttagtgttatattccagacgtgataccaaaattttgttgcaaatataatggacaatatttatttatacccatattcacagtggaatctgaagcttataaaagttgaatgacagcagcattaaacatatatgtgaagagtccccgatgtttgtagaccttatgtgagtatgcaaatatataaatttgagtatgcttgatttgtatattggaactcaacatgatcataaggagaagatacgtacccttaattgagtaactactatggtatttgttaatattttctacactaaataccattggtgtctttataggttgacataattatatatgtgtatgtacatatgtttgtgtgtatatgtaaatatatttctacacacatacttaaatatagtgatgtgctagtataacctcatactgacttaaaagttctgattgttaaattttaaggaattttgtgagccagttattaaaagcagtcattatttaaaatatgtaaacttacagttaaaaacaaaggtaataaatactcagcactcatcacttcctaattattttgctacatttcactattacctttgctgttttacttatttaatctgtatgatgaaaatactgtataatagtgtgcactgcacatctgtctcttcccagctccacattcagtgctgtcttggtagcttggacttagtgggagtgtttacaccatggaaattgacaaactataaatcagggttttaattttctcagagaacctgctgtcaaatatttacagcacatcactgtgtatatatgaaaacgtatttggcaatacaaaccacataccccttctatttcctgacataaataaatggctatggccatttacagctgaaccacgtcttcaagaaagaagccaaaaatatttccgtgaggtttttaactacctctgaatctgtcctactctaaatactaccggagtctctttgtaggttggccagtatatgtttttagtgaaatattatttcacaaagaactatatcacgtacctttcctctgactgtttcctggcatatatgcatgaatatggccattattgaactatcacttcagtaaagaagttaaacagtacttttctgaggtttttcagctacctctgggtcattctgtaatgtaaatgttgttaataagaatggtttttacataaattatgcaaaggttaacaagcagtaacactgcactcctcaaaaagtggcggtatgtaatgaaaggcccttttgatatccttgatttttcattgtgtatctgtttgggcacggtctatgtaacactagttctgcgtattagtattttagagtatctctgcctcccttgtcctgttgtttcttttgcccccttggaacacattggtcagcagttctaagagacactgcccacatgatggccattccctacttcatccttgctgagctaaattttatatttttgtgcatccttctcccagatgacttaggtggtaagtccagattagtcaaagctaatcatggaagttccattttaatgattctgttggggtgaacttgggagcaatgagatgtttgggaagtattgtgtagtacttctgggaaagatctccttgatacaacattgtcatgacatgagaagagactctgctgggctttttcatgtctgtaacatggtattggcttatcgtttttatctctgaagggcagtagcctgaagataacagtgcacaaggtgggaaaagccagctcagaggtgacgttgccgagctactctgctctctatacctgttctctactgggactttttataaccctcaataactgttttttatttggtcttagggctgtctgatacttagagctgaaggcattccagctgacacagaggaatatttttctaagtgttaatgttctatatggtaattagggggaagaattatttcttttcacaagttaatatagggatggctgtttgtatcagccatggttctttctggtggaaaacagaattctccaactaaaaatattttaatggcagactgattacagtggtgtgggccagaaacaagggacagtgaaacacccagagacttgtatcagcaggaagccattgccattctgagccttgaagggcaaggagggaaacagtgttaccagagcccagtaagaactgctgtcatgaaggaggggccaccttgtaagagacatcattactaccagaactgtggtgccaaattgctggtgtctctctttggagaaaccaaccagatacatctgctggagagcccaggtgggcacagagaagggtggagagagaatctgggaagagaaatggagaataagcagcacagtgttattcatttctgtaaattcctatgtagaaggctcagtgttagaaataaagttattctactagttgcaagttaagtgtttctgtttgttctgctttcctgttagcataagtaaactccctttggaactacacaggtatgtctctccttcaacatgtgtgaagcagacattatattaaattacattattcatacctccctgtggtgtttcttattgtatgtggtgtaaggtaagcagctctgtattcttccaaataaatagccagttgtccctg

SEQ ID NO: 7286 - DNA, 528 bp, Homo sapiens
gtgctggggctggggcggctacatagctgtgactaccagggggtgcagtctctggggaccaccactaccgaggctgggtaccatgattatcgcggaacacctgcccattaatcttgaccctgttaaaacaataactgcctatccagatatgccacacttctgcctgctgttggcaaccctcctggactaggctgctcttgttaatcacatggatgttatgtgaaaggcattgtacagaagaagatgagaatcacagtaaaccaaacaaaggaaatgcagaagagatattttcagctgaatattggaaagtaagattccctgcgagcaggatctcaggcaacgtcaatgaacaacatgaagcctgacacattctaattagtctaaggaaaatggtgacagaggatatattccgtaacgtctcaggaggtcgcctggctccagagagtgtaaaatgccacacgttggatgagatgattatccgagctcagacttgggaaatagtcatgcttctggaccaagtgccaggta

SEQ ID NO: 7287 - DNA, 1980 bp, Homo sapiens; identical to SEQ ID NO: 6515

SEQ ID NO: 7288 - DNA, 1889 bp, Homo sapiens
atggaactatctcctgagtgctgcaagttgtaacgggcaccgctgagcctgtttccctttggagcacttcttatctagaagcagtgtttagtttcttccaaactgggccacttcgtccacctactctgttctgagtaaggaaacagcctccaagcatcagcagagcccagatgagcacgggccgcggagccgcttagcagtctcccgggacccagctccggaggagccgcaagcatgcaccctgggttgtggctgctcctggttacgttgtgcctgaccgaggaactggcagcagcgggagagaagtcttatggaaagccatgtgggggccaggactgcagtgggagctgtcagtgttttcctgagaaaggagcgagacacaacttgcagctactgaatgatatggctggccggctctaccatttcagtgaggttctgcctaatctcttttgattctaaggggtaatgtggctcagccacagcaaggaggctgagttctgatgttctctttccccatacttctatggaagactggaagacagattacttgcagtgatttctggaggcagaagataagcaagtggcctctatgatggtagaaccaagaaagaatgatcattgcccttaagccttcagagatgacagctaaatccagagggaaaataaatagggataagattgtaaaaaaagttgctgctggagaaaaaatagctgctgctgataaagaacctcaataaattcaaacaatgtctgcgtttggccctcaaatgtcatgctggctcattgctcgggagaaagagccgtacaactaccatgtcagaggagatgaggaagcaaagaagtctgactaagggcactgccatggatattcttgcccctgctttggaacaatctatcattggattgtggagaggaagcaaggaggcagctggcagtgtgacaccacgtgctatgactcatgactgttttgcctgatggttggcaacatagtattggcacagttgtgggctctagagtacctgggcctgaatctctattgatatgtgccatttggcaaatttctaaactctaagtcttagctgtctcatatacaaaatgggcataatacatcctccctcatatggttgttgtgaggattaataaaacagtgtttataaagtgcttggcacagtgctgaacacatagcagtaaataaatattagtcattattaatattagctgatgcacatttgggggcaatttcaagaaagaattgattacaatagtaaattcagactatggcatctattgattgttcctttttaaatgaaccattttaaatacagtaaaagccctcctccctggcctctgcttaacttcctttatggagtaagtcgatgtttttccttcctattggaatatacactggccaatgctcagggcacaatggaagctcatgggcaggtaagttacttctggtgaacacttatatttctgcttccacacaacaagttgatcacttaccaaaagttagctgtgtttttgccaagcccatttatggcagttgtactcgttattacaagtaggtaatttaatgtaaatttgtgaaatatgagtataaaaagaaaactattattttcatgaaaactaagttcaatgctttggaaagacttactaaagaaaagttgcttttgaaaactgccatattgttaaaaataaaacaaaactgaaagtggaaatcaaatgtgatgcattaggaatgtaacttacgtgaaaaagagtctgtgaaatcccagggtgtggcctcacgctcaaagaaaaggccttggccttacaacacatcaccagagtggtgaatgaatgtacctttgtgtgttttaggttgaaataaaatgttttatgtatgtata

SEQ ID NO: 7289 - DNA, 3539 bp, Homo sapiens
aagaagttagcaaatgatgtaaaagaaaatgaagaccatctaaatggcttaaaaaccaggatagaaaatgctgatgctagaaatggggatctcttgagaactttgaatgacactttgggaaagttatcagctattccaaatgatacagctgctaaactgcaagctgttaaggacaaagccagacaagccaacgacacagctaaagatgtactggcacagattacagagctccaccagaacctcgatggcctgaagaagaattacaataaactagcagacagcgtcgccaaaacgaatgctgtggttaaagatccttccaagaacacagttgccgatgcagatgccactgtcaaaaatttagaacaggaagctgaccggctaatagataaactcaaacccatcaaggaacttgaggataacctaaagaaaaacatctctgagataaaggaattgataaaccaagctcggaaacaagccaattctatcaaagtatctgtgtcttcaggaggtgactgcattcgaacatacaaaccagaaatcaagaaaggaagttacaataatattgttgtcaacgtaaagacagctgttgctgataacctcctcttttatcttggaagtgccaaatttattgactttctggctatagaaatgcgtaaaggcaaagtcagcttcctctgggatgttggatctggagttggacgtgtagagtacccagatttgactattgatgactcatattggtaccgtatcgtagcatcaagaactgggagaaatggaactatttctgtgagagccctggatggacccaaagccagcattgtgcccagcacacaccattcgacgtctcctccagggtacacgattctagatgtggatgcaaatgcaatgctgtttgttggtggcctgactgggaaattaaagaaggctgatgctgtacgtgtgattacattcactggctgcatgggagaaacatactttgacaacaaacctataggtttgtggaatttccgagaaaaagaaggtgactgcaaaggatgcactgtcagtcctcaggtggaagatagtgaggggactattcaatttgatggagaaggttatgcattggtcagccgtcccattcgctggtaccccaacatctccactgtcatgttcaagttcagaacattttcttcgagtgctcttctgatgtatcttgccacacgagacctgagagatttcatgagtgtggagctcactgatgggcacataaaagtcagttacgatctgggctcaggaatggcttccgttgtcagcaatcaaaaccataatgatgggaaatggaaatcattcactctgtcaagaattcaaaaacaagccaatatatcaattgtagatatagatactaatcaggaggagaatatagcaacttcgtcttctggaaacaactttggtcttgacttgaaagcagatgacaaaatatattttggtggcctgccaacgctgagaaacttgagtatgaaagcaaggccagaagtaaatctgaagaaatattccggctgcctcaaagatattgaaatttcaagaactccgtacaatatactcagtagtcccgattatgttggtgttaccaaaggatgttccctggagaatgtttacacagttagctttcctaagcctggttttgtggagctctcccctgtgccaattgatgtaggaacagaaatcaacctgtcattcagcaccaagaatgagtccggcatcattcttttgggaagtggagggacaccagcaccacctaggagaaaacgaaggcagactggacaggcctattatgcaatactcctcaacaggggccgtctggaagtgcatctctccacaggggcacgaacaatgaggaaaattgtgatcagaccagagccgaatctgtttcatgatggaagagaacattccgttcatgtagagcgaactagaggcatctttacagttcaagtggatgaaaacagaagatacatgcaaaacctgacagttgaacagcctatcgaagttaaaaagcttttcgttgggggtgctccacctgaatttcaaccttccccactcagaaatattcctccttttgaaggctgcatatggaatcttgttattaactctgtccccatggactttgcaaggcctgtgtccttcaaaaatgctgacattggtcgctgtgcccatcagaaactccgtgaagatgaagatggagcagctccagctgaaatagttatccagcctgagccagttcccaccccagcctttcctacgcccaccccagttctgacacatggtccttgtgctgcagaatcagaaccagctcttttgatagggagcaagcagttcgggctttcaagaaacagtcacattgcaattgcatttgatgacaccaaagttaaaaaccgtctcacaattgagttggaagtaagaaccgaagctgaatccggcttgcttttttacatggctcgcatcaatcatgctgattttgcaacagttcagctgagaaatggattgccctacttcagctatgacttggggagtggggacacccacaccatgatccccaccaaaatcaatgatggccagtggcacaagattaagataatgagaagtaagcaagaaggaattctttatgtagatggggcttccaacagaaccatcagtcccaaaaaagccgacatcctggatgtcgtgggaatgctgtatgttggtgggttacccatcaactacactacccgaagaattggtccagtgacctatagcattgatggctgcgtcaggaatctccacatggcagaggcccctgccgatctggaacaacccacctccagcttccatgttgggacatgttttgcaaatgctcagaggggaacatattttgacggaaccggttttgccaaagcagttggtggattcaaagtgggattggaccttcttgtagaatttgaattccgcacaactacaacgactggagttcttctggggatcagtagtcaaaaaatggatggaatgggtattgaaatgattgatgaaaagttgatgtttcatgtggacaatggtgcgggcagattcactgctgtctatgatgctggggttccagggcatttgtgtgatggacaatggcataaagtcactgccaacaagatcaaacaccgcattgagctcacagtcgatgggaaccaggtggaagcccaaagcccaaacccagcatctacatcagctgacacaaatgaccctgtgtttgttggaggcttcccagatgacctcaagcagtttggcctaacaaccagtattccgttccgaggttgcatcagatccctgaagctcaccaaaggcacagcaagccactggaggttaattttgccaaggccctggaactgaggggcgttcaacctgtatcatgcccagccaactaataaaaataagtgtaaccccaggaagagtctgtcaaaacaagtatatcaagtaaaacaaacaaatatattttacctatatatgttaattaaactaatttgtgcatgtacatagaattc

SEQ ID NO: 7290 - DNA, 1118 bp, Homo sapiens
ccgtgcgggaatgggcgtggcctgggcggggcgggcgctaggacccaccggagcgccgtgaacgtcaccgagcggcgccgaggccccgggttgagcgggaggcgcgatcggtccggtcggtggctccccgcggcggggccgggcccgatctcgggcgggaaccgagcgcagagccggtagcgggaaggatgaccacgctcacacgacaagacctcaactttggccaagtggtggccgatgtgctctgcgagttcctggaggtggctgtgcatctcatcctctacgtgcgcgaggtctaccccgtgggcatcttccagaaacgcaagaagtacaacgtgccggtccagatgtcctgccacccggagctgaatcagtatatccaggacacgctgcactgcgtcaagccactcctggagaagaatgatgtggagaaagtggtggtggtgattttggataaagagcaccgcccagtggagaaattcgtctttgagatcacccagcctccactgctgtccatcagctcagactcgctgttgtctcatgtggagcagctgctccgggccttcatcctgaagatcagcgtgtgcgatgccgtcctggaccacaaccccccaggctgtaccttcacagtcctggtgcacacgagagaagccgccactcgcaacatggagaagatccaggtcatcaaggatttcccctggatcctggcggatgagcaggatgtccacatgcatgacccccggctgataccactaaaaaccatgacgtcggacattttaaagatgcagctttacgtggaagagcgcgctcataaaggcagctgagggggcacctgccaccccactgatgcccaaactgtcagactttgggggatccccgcctagggcagtgctgcatggctgccctgattccaagtgctcttatcgcctctgtgtgtggatcgcccgccccagcccggggccgctcaggtctgcttggaggatgcctcccccaggagggcagtgagggatgccgcaacctcgacttctcagcctcctggggttccgccggccaacactgtctgtctcaaatactgtgctgtgagttgtttcaataaaggggccccaagggctgggctg

SEQ ID NO: 7291 - DNA, 990 bp, Homo sapiens
cggcgtctgcgcagctgccagcgcctttaagcccgggctcgcgctctcggaccgtgctttcgccgcctgggagccgtccggcgcagcagtttctaggtccccactgtccccgccgtcccgccccttcgcgtcccgggaaccggctggcttccgagccgcactcgccgatcctccaggcatgccccgctacgagctggctttaatcctgaaagccatgcagcggccagagactgctgctactttgaaacgtacgatagaggccctgatggacagaggagcaatagtgagggacttggaaaacctgggtgaacgagcgcttccttataggatctctgcccacagtcagcagcacaacagaggcgggtatttcttggtggatttttatgcacccaccgcagctgttgaaagcatggtggagcacttgtctcgagatatagatgtgattagagggaatattgtcaaacaccctctgacccaggaactaaaagaatgtgaagggattgtcccagtcccactcgcagaaaaattatattccacaaagaagaggaagaagtgagaagattcgccagattttagccttatatgtaattccttcacatttgggcagcatggacgagaaggaagaatttgcaagtttggcctttatataagcatgtgttgcaggtgctgtttgatttttctaaggtatttttagcccttgatcccctttgcttgcgagaggtggggaactgctcactgacagcttctctgtaacctgcagtaccagtggatcgttcttgattttgttttcattagtgtcatttctttgtcattgaggacttttccccttacaacagtaacaccattttttgaagagcaaaacttataatacctcctgggattgtgagctagtcattcagcctgtgtaaccatgtggaaataaaaattgacgaccaatgtattatatggacaacttttgctttgagtaataaacttgattgtaggaatgtg

SEQ ID NO: 7292 - DNA, 1141 bp, Homo sapiens
agtgtcatcacaaattaccaggagaaattgcttccagctcacaatcacatctgcttttggcaagaactaatgcaccaagacttcaagttctaagcctctgttcagattttaattgcaattgatcaggtttatattattgtacctccagagacctcctagagccagaacccggctggcttgctgtttcctttagagcagcgcatatcattatttggtgttctggtggaggacttttctgatggcagaaattagtttctctgggttcatcaggacgggatgcttcaagatttaagtgcaagtgtcttctttccaccttgttcacaacacagaacgttagtggcttttcatggcctgccactgaaaatcaagaaagaaccccacagtccatgttcagaaatcagctctgcctgcagtcaagaacagccctttaaattcagctatggagaaaagtgcctgtacaatgtcagtgcctatgatcagaagccacaagtgggaatgaggccctccaacccccccacaccatccagcacgccagtgtccccactgcatcatgcatctccaaactcaactcatacaccgaaacctgaccgggccttcccagctcacctccctccatcgcagtccataccagatagcagctaccccatggaccacagatttcgccgccagctttctgaaccctgtaactcctttcctcctttgccgacgatgccaagggaaggacgtcctatgtaccaacgccagatgtctgagccaaacatccccttcccaccacaaggctttaagcaggagtaccacgacccagtgtatgaacacaacaccatggttggcagtgcggccagccaaagctttccccctcctctgatgattaaacaggaacccagagattttgcatatgactcagaagtgcctagctgccactccatttatatgaggcaagaaggcttcctggctcatcccagcagaacagaaggctgtatgtttgaaaagggccccaggcagttttatgatgacacctgtgttgtcccagaaaaattcgatggagacatcaaacaagagccaggaatgtatcgggaaggacccacataccaacggcgaggatcacttcagctctggcagtttttggtagctcttctggatg

SEQ ID NO: 7293 - DNA, 4168 bp, Homo sapiens
atgtacacgcgcacccgcacccgcgcgcctgtatcccgtgctgtttccctggcagacacacaggcgctcacgagtctctccttgccagcctgcagggcggcgacccccaaaacccagctccgggtcccaacctaggcaagaagctgcttctctgccaacagctcctcttcggcctccgtcacagccacctggaccctaccctttcgcgactgctgctgctgctgcccggacgtggaagcagcaagaggcgcttggtcaagacacactgacggtacctacagaatactggacatacggattcagaatccataaggctttatcaccttgaatcaaggatttatttgatatcatcctcggtctttacttcctatcaagtaacattgttttgaaaaatagagttaacacatttgccataagggagtttttttttttttttttaaatacttcgcatactctccaatgcccaaaaatagcaaggtggtaaaaagagaattagatgatgatgttactgagtctgtcaaagaccttctttccaatgaagacgcagctgatgatgcttttaagacaagtgaactaattgttgatggccaggaagagaaagatacagatgttgaagaaggatctgaagtcgaagatgaaagaccagcttggaacagtaaactacaatacatcctggcccaagttggattttctgtaggtttaggaaatgtgtggcgatttccatacctatgtcagaagaatgggggcggtgcatatcttttaccatatttaatactacttatggtaataggtattcccctttttttcttggaactctctgtgggtcaaagaattcggcgaggcagcattggtgtatggaattacataagccctaaactgggcgggattggatttgcaagttgtgtagtgtgctattttgtagctctctactacaacgtcatcattggctggagtttgttttatttttctcagtcttttcagcaacccctgccttgggatcagtgtcctttggtgaaaaatgcttcacacacttttgtagaaccagaatgtgaacaaagttctgccaccacctattactggtacagggaagcactgaatatttcaagttccatttctgaaagtgggggcttaaactggaagatgaccatctgcttgttggctgcctgggtcatggtttgcttggctatgatcaaaggcattcagtcttctggaaaagttagtatgttagagcccttcctcattctgctaatcaccatttctggattcatccctctctcaaattctgttacagatttctgtgggcaaatcacacataacacttcattctaggtagttaaatattagtgaaaagtgacacttcaaaagtgtgcttacatttttaaaaagacaaataaaaacagtgttttatagtgaaatctaaggttaattataatctttccttatttcaacaagatctttaaaatttttgtgaatacttaaaagtcctttctttttgccctttattcaattagtcctaatgtttcagttctctaattaccaattagttaaattatggaaattggggaaagtggtaaaatgagtaattcattcattttgtttgtttgatatcatttgtttctctctgctgtaggtgttctaaggaatagctgcataagacattttgaaataatgtaatgtgaagtgtttcttaaagctctgaacatcattaagtagttaataataattccaacaaggaattcagagtaatgtaaaagactaaatatcattccttctaaggcaaattgaaaattagaatggttgtggtttaaaaagacattaagtgaattctaggtagcttgtttgttattatttttaaaggacgctctaggaaagtaattgctattcactattttgctttcgtattactttttttttttttttttcattatcacagccattgttctaaagctctccacatctcttggctggatcatagcaagaatttactgttggctcttctctctgccgtttaactgtccagctgtgctattttccttttcaaagtataactgatttcaggctaacttattaccactcatcatcatatactagcaggaatggcaatagtagtagtagtagcagcagcaatagtagaagtagtcataataacaataataataaatgatgataaagatgtttctgacaagaattagggtaagaacagtaattgaagccaattatttattacaaatgtattttgctttgggtactgtgataactactttttatactttatcccatttaattataaaaaccactcttgagaagtaatttttattttcagaaccattttacagatttaaaataaacaggtttgaggaattagtttaacttatccaaagtttcgtggctattaagttctagtatttggagtcaaatgcaagtctgtctaaatctagagcccatgttctttaactgcaacactataatgtctcaccccgtcctagtcccaccaattagtcaactcttttagggcagaagtctgtctaattcatctttgcttcctgttactttatatttaattaaaaattttagtgactttttaacttgtaaattgtagctgattttacatttatcttcctgaaggaaactctgtatcattttgtcttttgaatttgtgaatatacttgttaacacatctaaatatctttaagtctttggcaatgttattgtattatatgactaaataacttcgaattgttcaattgtgtatgtcttccactatgtcagagccacattcccgtcacattataaatgaaggagtggattcttaaataagacctaaccatatttatatgattcctaacataatatcatttggtagaaagaaaaccaactgtggtcatccagagaagctcaaaaactcttgtactcaggttctcttactaccacgttttgtttctgtttcttcttagtctgtgtcttagcatcacttaaagaactattcatccttttcttatcacagaatcttggggttgttcttctcatgtcatgtagtgtaaatttatatagaaaatgtaatacaatttatttagtacatacatttattattttaatgagaatgcctcaggaaaagactagtatttgggcaatatttgaagaaagaatttaacaggcactgatggggagaaagctagctgtaggtaatgtgagcaaagatgtggaagccaaaattgtcacaattcctcaatctgaaacaatgagttaaatataataacaatgactttatgaggaattaaaggttaagctttgtgtttacctactaaacagaaaatgcctccaaataaacagtgtcacaagtacagaagagagaaatattgtttaaggctagcacatggaaaaacaacttagaggatttagcagctaaaagaagaatgagtcagctggtgatgtgcttggtcaaaacacacagtcatacatgcatatacatataccccaaaatgctaagtggaaactgcatgaattaaaagaggggtatgatagggacattgtcctttgggctaggtaggcacatatcagttggaccacatctgcaatactggattttactgaaatcttgtattttcctttttattatgagaaatttcagctcagtgatcaaagtcttcaaatagttaaaccaaaagaagaatagggctgctttgtgtggccatagagagcaaaactatgatcaaatagtgggtattatggaggaggttgtgatggtggtaagccttcaaagaaagaaaggcctttcaagaatcaaacttgataataatgaaatcagttgcctcaatggtagagagctcagcatcactggaggtggtcacacagaggtagcatgtgccctagttacagaatctattaaggggatgactgtctcaaatatgtaggacagaaatgagaagccccaagcttgcttttaactctaaggtagtattttctactctgactactttcctgttgttactactactatgctaaatactatgcatacattatcttgtttattctttctatcagctagataatttgcatattttatccccattttactgcaaagttgacaagctcagggaaaataaatagttggccagaattaagcaaccaatacatgatagacagggctaaaactgggctacagaatttt

SEQ ID NO: 7294 - DNA, 879 bp, Homo sapiens
gggagcagaccaaggcgctggtcacccaactcaccctcttcaaccagatcctggtggagctgcgggatgatatacgagaccaggtgaaggaaatgtccctgatccgaaacaccattatggagtgtcaggcttccatgagcagcgttcccactgcagccccaatccctgcttccgaggtgtggactgcatggaagtgtacgagtacccaggctaccgctgtgggccctgcccccctggcctgcagggcaacggcacccactgcagtgacatcaatgagtgtgctcacgctgacccctgtttcccgggctccagctgcatcaacaccatgcccggcttccactgtgaggcctgtcctcgagggtacaagggcacacaggtgtctggtgtgggcattgactatgcccgggccagcaaacagtctgccccttcaggtctgcaatgacatcgatgaatgcaacgatggcaacaatggtggctgtgacccaaactccatctgcaccaacactgtgggctctttcaagtgtggtccctgccgcctgggtttcctgggcaaccagagccagggctgcctcccagcccggacctgccacagcccagcccacagcccctgccacatccatgctcactgtctctttgaacgcaatggtgcagtgtcctgccagtgtaacgtgggctgggctgggaatgggaacgtgtgtgggactgacacagacatcgatggctacccagaccaagcactgccctgcatggacaacaacaaacactgcaaacaggacaactgccttttgacacccaactctgggcaggaagatgctgataatgatggtgtgggggaccagtgtgatgatgatgctgatggggatgggatcaagaatgttg

SEQ ID NO: 7295 - DNA, 1299 bp, Homo sapiens
agcaacgctaggaagggcgggcagaaagggcacgctcttgtgggtgactacaggttaggagaccgttgaacctggaggggccctaggatggaccccgtggaaagattcagagactgcgccctctccctggcgccgccttcccctacacgcggcgggtatattctgttgcagttggcccaggacctgtttccaagactctgccccctcgcacttccgtccctcctggttttgtaaagtgatgctcataggaacccccaccccgcgtgacactactcccagctcctggctgacttctagtcttctggttgaagctgcgcctttagatgacacgaccctacccacccctgtttccagcggatgcccgggcctggagcccacagaattcttccagtccctgggtggggacggagaaaggaacgttcagattgagatggcccatggcaccaccacgctcgccttcaagttccagcatggagtgattgcagcagtggattctcgggcctcagctgggtcctacattagtgccttacgggtgaacaaggtgattgagattaacccttacctgcttggcaccatgtctggctgtgcagcagactgtcagtactgggagcgcctgctggccaaggaatgcaggctgtactatctgcgaaatggagaacgtatttcagtgtcggcagcctccaagctgctgtccaacatgatgtgccagtaccggggcatgggcctctctatgggcagtatgatctgtggctgggataagaagggtcctggactctactacgtggatgaacatgggactcggctctcaggaaatatgttctccacgggtagtgggaacacttatgcctacggggtcatggacagtggctatcggcctaatcttagccctgaagaggcctatgaccttggccgcagggctattgcttatgccactcacagagacagctattctggaggcgttgtcaatatgtaccacatgaaggaagatggttgggtgaaagtagaaagtacagatgtcagtgacctgctgcaccagtaccgggaagccaatcaataatggtggtggtggcagctgggcaggtctcctctgggaggtcttggccgactcagggacctaagccacgttaagtccaaggagaagaagaggcctagcctgagccaaagagagagtacgggctcagcagccagaggaggccggtgaagtgcatcttctgcgtgttctctatttgaacaagcatttcccccagggaagtttctgggtgccccactaagtagaataaagaaaaacggttataaata

SEQ ID NO: 7296 - DNA, 904 bp, Homo sapiens
aggcgcagaggagggcggtgttgagaccggcggagcggcgggacccctaggtggcggagggacgctccgggaaagcgaggggcgctacgagctctggcccacgtgacctgccgggggcgggagcagggggcgcgccggcctcctgcggtgcccctgccttggggaggggccgtgaccacccgtctgtcgcccgaggcggccgccgctgcaccttcaccgcgtacccgggacccgcccgcccgcgggagcttataatatgactcgatggaggaaaatttgataagcatgagagaagaccattcttttcatgttcgttacagaatggaagcttcttgcctagagctggccttggaaggggaacgtctatgtaaatcaggagactgccgcgctggcgtgtcattctttgaagctgcagttcaagttggaactgaagacctaaaaacacttagcgctatttacagccagttgggcaatgcttatttctatttgcatgattatgccaaagcattagaatatcaccatcatgatttaacccttgcaaggactattggagaccagctgggggaagcgaaagctagtggtaatctgggaaacaccttaaaagttcttgggaattttgacgaagccatagtttgttgtcagcgacacctagatatttccagagagcttaatgacaaggtgggagaagcaagagcactttacaatcttgggaatgtgtatcatgccaaagggaaaagttttggttgccctggtccccaggatgtaggagaatttccagaagaagtgagagatgctctgcaggcagccgtggatttttatgaggaaaacctatcattagtgactgctttgggtgaccgagcggcacaaggacgtgcctttggaaatcttggaaacacacattacc

SEQ ID NO: 7297 - DNA, 630 bp, Homo sapiens
agactactcaggcgtgcactgcgaggtggagatctgacttctcttgttcccgcttaagactgcctcctgtatacttcattttcttagcgtttctggagattacaacatcctgcggttccgtttctgggaactttactgatttatctcccccctcacacaaataagcattgattcctgcatttctgaagatctcaagatctggactactgttgaaaaaatttccagtgaggctcacttatgtctgtaaagatgggaaaaaaatacaagaacattgttctactaaaaggattagaggtcatcaatgattatcattttagaatggttaagtccttactgagcaacgatttaaaacttaatttaaaaatgagagaagagtatgacaaaattcagattgctgacttgatggaagaaaagttccgaggtgatgctggtttgggcaaactaataaaaattttcgaagatataccaacgcttgaagacctggctgaaactcttaaaaaagaaaagttaaaagtaaaaggaccagccctatcaagaaagaggaagaaggaagtggatgctacttcacctgcaccctccacaagcagcactgtcaaaactgaaggagcagaggcaactcctggagctcag

SEQ ID NO: 7298 - DNA, 3063 bp, Homo sapiens
gagcggacaggcgtggcggccggagccccagcatccctgcttgaggtccaggagcggagcccgcggccaccgccgcctgatcagcgcgaccccggcccgcgcccgccccgcccggcaagatgctgcccgtgtaccaggaggtgaagcccaacccgctgcaggacgcgaacctctgctcacgcgtgttcttctggtggctcaatcccttgtttaaaattggccataaacggagattagaggaagatgatatgtattcagtgctgccagaagaccgctcacagcaccttggagaggagttgcaagggttctgggataaagaagttttaagagctgagaatgacgcacagaagccttctttaacaagagcaatcataaagtgttactggaaatcttatttagttttgggaatttttacgttaattgaggaaagtgccaaagtaatccagcccatatttttgggaaaaattattaattattttgaaaattatgatcccatggattctgtggctttgaacacagcgtacgcctatgccacggtgctgactttttgcacgctcattttggctatactgcatcacttatatttttatcacgttcagtgtgctgggatgaggttacgagtagccatgtgccatatgatttatcggaaggcacttcgtcttagtaacatggccatggggaagacaaccacaggccagatagtcaatctgctgtccaatgatgtgaacaagtttgatcaggtgacagtgttcttacacttcctgtgggcaggaccactgcaggcgattgcagtgactgccctactctggatggagataggaatatcgtgccttgctgggatggcagttctaatcattctcctgcccttgcaaagctgttttgggaagttgttctcatcactgaggagtaaaactgcaactttcacggatgccaggatcaggaccatgaatgaagttataactggtataaggataataaaaatgtacgcctgggaaaagtcattttcaaatcttattaccaatttgagaaagaaggagatttccaagattctgagaagttcctgcctcagagggatgaatttggcttcatttttcagtgcaagcaaaatcatcgtgtttgtgaccttcaccacctacgtgctcctcggcagtgtgatcacagccagccgcgtgttcgtggcagtgacgctgtatggggctgtgcggctgacggttaccctcttcttcccctcagccattgagagggtgtcagaggcaatcgtcagcatccgaagaatccagacctttttgctacttgatgagatatcacagcgcaaccgtcagctgccgtcagatggtaaaaagatggtgcatgtgcaggattttactgctttttgggataaggcatcagagaccccaactctacaaggcctttcctttactgtcagacctggcgaattgttagctgtggtcggccccgtgggagcagggaagtcatcactgttaagtgccgtgctcggggaattggccccaagtcacgggctggtcagcgtgcatggaagaattgcctatgtgtctcagcagccctgggtgttctcgggaactctgaggagtaatattttatttgggaagaaatacgaaaaggaacgatatgaaaaagtcataaaggcttgtgctctgaaaaaggatttacagctgttggaggatggtgatctgactgtgataggagatcggggaaccacgctgagtggagggcagaaagcacgggtaaaccttgcaagagcagtgtatcaagatgctgacatctatctcctggacgatcctctcagtgcagtagatgcggaagttagcagacacttgttcgaactgtgtatttgtcaaattttgcatgagaagatcacaattttagtgactcatcagttgcagtacctcaaagctgcaagtcagattctgatattgaaagatggtaaaatggtgcagaaggggacttacactgagttcctaaaatctggtatagattttggctcccttttaaagaaggataatgaggaaagtgaacaacctccagttccaggaactcccacactaaggaatcgtaccttctcagagtcttcggtttggtctcaacaatcttctagaccctccttgaaagatggtgctctggagagccaagatacagagaatgtcccagttacactatcagaggagaaccgttctgaaggaaaagttggttttcaggcctataagaattacttcagagctggtgctcactggattgtcttcattttccttattctcctaaacactgcagctcaggttgcctatgtgcttcaagattggtggctttcatactgggcaaacaaacaaagtatgctaaatgtcactgtaaatggaggaggaaatgtaaccgagaagctagatcttaactggtacttaggaatttattcaggtttaactgtagctaccgttctttttggcatagcaagatctctattggtattctacgtccttgttaactcttcacaaactttgcacaacaaaatgtttgagtcaattctgaaagctccggtattattctttgatagaaatccaataggaagaattttaaatcgtttctccaaagacattggacacttggatgatttgctgccgctgacgtttttagatttcatccagagatgggatctcgctgtgttgtcctggctggtctcaaactcctaggctcaagcaatcctcctccctcctcaagcaaacctcagtgctgggattataggcatgagccactgtacctggctaaatgttgtttttttgatattcaatttttgtttatagaattttcatttgttttgctcttatacttttcatctttttatgtttattgaccaattaaatatcatttgggtaagcacctatttaagtgtcttaacaatttttctattgagtactctgggtttttgttttgtttttcttactgatttgtagaattctttatgtattctgaattgcagataccttccttctgtactaatgcttatctttttagccctgtaatattgtgttttcataaacatacttatcaatcttt

SEQ ID NO: 7299 - DNA, 2614 bp, Homo sapiens
accctcttttcttatcattgacatttaaactctggggcaggtcctcgcgtagaacgcggctgtcagatctgccacttcccctgccgagcggcggtgagaagtgtgggaaccggcgctgccaggctcacctgcctccccgccctccgctcccagggggaagactttaactaggggcgcgcagatgtgtgaggccttttattgtgagagtggacagacatccgagatttcagagccccatattcgagccccgtggaatcccgcggcccccagccagagccagcatgcagaacagtcacagcggagtgaatcagctcggtggtgtctttgtcaacgggcggccactgccggactccacccggcagaagattgtagagctagctcacagcggggcccggccgtgcgacatttcccgaattctgcagacccatgcagatgcaaaagtccaagtgctggacaatcaaaacgtgtccaacggatgtgtgagtaaaattctgggcaggtattacgagactggctccatcagacccagggcaatcggtggtagtaaaccgagagtagcgactccagaagttgtaagcaaaatagcccagtataagcgggagtgcccgtccatctttgcttgggaaatccgagacagattactgtccgagggggtctgtaccaacgataacataccaagcgtgtcatcaataaacagagttcttcgcaacctggctagcgaaaagcaacagatgggcgcagacggcatgtatgataaactaaggatgttgaacgggcagaccggaagctggggcacccgccctggttggtatccggggacttcggtgccagggcaacctacgcaagatggctgccagcaacaggaaggagggggagagaataccaactccatcagttccaacggagaagattcagatgaggctcaaatgcgacttcagctgaagcggaagctgcaaagaaatagaacatcctttacccaagagcaaattgaggccctggagaaagagtttgagagaacccattatccagatgtgtttgcccgagaaagactagcagccaaaatagatctacctgaagcaagaatacaggtatggttttctaatcgaagggccaaatggagaagagaagaaaaactgaggaatcagagaagacaggccagcaacacacctagtcatattcctatcagcagtagtttcagcaccagtgtctaccaaccaattccacaacccaccacaccggtttcctccttcacatctggctccatgttgggccgaacagacacagccctcacaaacacctacagcgctctgccgcctatgcccagcttcaccatggcaaataacctgcctatgcaacccccagtccccagccagacctcctcatactcctgcatgctgcccaccagcccttcggtgaatgggcggagttatgatacctacacccccccacatatgcagacacacatgaacagtcagccaatgggcacctcgggcaccacttcaacaggactcatttcccctggtgtgtcagttccagttcaagttcccggaagtgaacctgatatgtctcaatactggccaagattacagtaaaaaaaaaaaaaaaaaaaaaaaggaaaggaaatattgtgttaattcagtcagtgactatggggacacaacagttgagctttcaggaaagaaagaaaaatggctgttagagccgcttcagttctacaattgtgtcctgtattgtaccactggggaaggaatggacttgaaacaaggacctttgtatacagaaggcacgatatcagttggaacaaatcttcattttggtatccaaacttttattcattttggtgtattatttgtaaatgggcatttgtatgttataatgaaaaaaagaacaatgtagactggatggatgtttgatctgtgttggtcatgaagttgttttttttttttttaaaaagaaaaccatgatcaacaagctttgccacgaatttaagagttttatcaagatatatcgaatacttctacccatctgttcatagtttatggactgatgttccaagtttgtatcattcctttgcatataattaaacctggaacaacatgcactagatttatgtcagaaatatctgttggttttccaaaggttgttaacagatgaagtttatgtgcaaaaaagggtaagatataaattcaaggaagaaaaaaagttgatagctaaaaggtagagtgtgtcttcgatataatccaatttgttttatgtcaaaatgtaagtatttgtcttccctagaaatcctcagaatgatttctataataaagttaatttcatttatatttgacaagaatatagatgttttatacacattttcatgcaatcatacgtttcttttttggccagcaaaagttaattgttcttagatatagttgtattactgttcacggtccaatcattttgtgcatctagagttcattcctaatcaattaaaagtgcttgcaagagttttaaacttaagtgttttgaagttgttcacaactacatatcaaaattaaccattgttgattgtaaaaaaccatgccaaagcctttgtatttcctttattatacagttttctttttaacct

SEQ ID NO: 7300 - DNA, 947 bp, Homo sapiens
tccgcattccttggtgccactgaccacagctctttcttcagggacagacatggctcagcggatgacaacacagctgctgctccttctagtgtgggtggctgtagtaggggaggctcagacaaggattgcatgggccaggactgagcttctcaatgtctgcatgaacgccaagcaccacaaggaaaagccaggccccgaggacaagttgcatgagcagtgtcgaccctggaggaagaatgcctgctgttctaccaacaccagccaggaagcccataaggatgtttcctacctatatagattcaactggaaccactgtggagagatggcacctgcctgcaaacggcatttcatccaggacacctgcctctacgagtgctcccccaacttggggccctggatccagcaggtggatcagagctggcgcaaagagcgggtactgaacgtgcccctgtgcaaagaggactgtgagcaatggtgggaagattgtcgcacctcctacacctgcaagagcaactggcacaagggctggaactggacttcagggtttaacaagtgcgcagtgggagctgcctgccaacctttccatttctacttccccacacccactgttctgtgcaatgaaatctggactcactcctacaaggtcagcaactacagccgagggagtggccgctgcatccagatgtggttcgacccagcccagggcaaccccaatgaggaggtggcgaggttctatgctgcagccatgagtggggctgggccctgggcagcctggcctttcctgcttagcctggccctaatgctgctgtggctgctcagctgacctccttttaccttctgatacctggaaatccctgccctgttcagccccacagctcccaactatttggttcctgctccatggtcgggcctctgacagccactttgaataaaccagacaccgcaca

SEQ ID NO: 7301 - DNA, 1280 bp, Homo sapiens
ttttaatggtcagactctattacaccccacattctcttttcttttattcttgtctgttctgcctcactcccgagctctactgactcccaacagagcgcccaagaagaaaatggccataagtggagtccctgtgctaggatttttcatcatagctgtgctgatgagcgctcaggaatcatgggctatcaaagaagaacatgtgatcatccaggccgagttctatctgaatcctgaccaatcaggcgagtttatgtttgactttgatggtgatgagattttccatgtggatatggcaaagaaggagacggtctggcggcttgaagaatttggacgatttgccagctttgaggctcaaggtgcattggccaacatagctgtggacaaagccaacctggaaatcatgacaaagcgctccaactatactccgatcaccaatgtacctccagaggtaactgtgctcacgaacagccctgtggaactgagagagcccaacgtcctcatctgtttcatagacaagttcaccccaccagtggtcaatgtcacgtggcttcgaaatggaaaacctgtcaccacaggagtgtcagagacagtcttcctgcccagggaagaccaccttttccgcaagttccactatctccccttcctgccctcaactgaggacgtttacgactgcagggtggagcactggggcttggatgagcctcttctcaagcactgggagtttgatgctccaagccctctcccagagactacagagaacgtggtgtgtgccctgggcctgactgtgggtctggtgggcatcattattgggaccatcttcatcatcaagggattgcgcaaaagcaatgcagcagaacgcagggggcctctgtaaggcacatggaggtgatggtgtttcttagagagaagatcactgaagaaacttctgctttaatggctttacaaagctggcaatattacaatccttgacctcagtgaaagcagtcatcttcagcattttccagccctatagccaccccaagagtggttatgcctcctcgattgctccatactctaacatctagctggcttccctgtctattgccttttcctgtatctattttcctctatttcctatcattttattatcaccatgcaatgcctctggaataaaacatacaggagtctgtctctgctatggaatgccccatggggcatctcttgtgtacttattgtttaaggtttcctcaaactgtgatttttctgaacacaataaactattttgaagatcttgggtggaa

SEQ ID NO: 7302 - DNA, 2627 bp, Homo sapiens
agcaaacccggcctcaccttttcctgcccgaagcagaagattctcgcagtcctggtttctccctccagaagaccccccacccaaatcctctgtagctcctggtagtgccctgacccctgctgccaccgtccttcagagagcaacggaagagcttcccggagggcgaggaaaagagggaaagtagccagcaatgtcgaacgcaatgtataataagatgtggcatcagacccaagaagccctcggtgctttactcgataaagagcctcagaagatgattgaaccacaaagaaatcaggttttcatctttcaaacattagccaccttctacgtaaagtatgtgcagatctttagaaacctagagaatgtctacgaccagttcgtccacccccagaaacgaatactgatcaggaaagtcctggacggggtgatgggccgcatcctggagctgaagaacgagatggtggagctggaactcacggagttccattatttcgatgatatcctgcaggatctcaagctggccccccaacaattagatattcccatacccaagtattttttgaaggagaagttggaagtaataaaaggaagagagaaaattcttgctcaaatattagcggacagcggaatagatacatctgacatgaaataccctgtaaagagtatccctttcgatgaggctgttaaattaatccagattgctgagagggcacggcaaggtcgcctaagggctttattcatgaagcaaatctatctgcaagaatatagagcaaagcaatccaagatgcttggcaagaaagtgacagatacctgggctgctgcactccgcattcagaaggtttggcgacgtttccatcaacgtaaggaaactgaaaaactgagagaagaggagatgatcttcctgggtatgaatccacctcctctctttaatgaagtcagtgctacagtaatccaggctgaaaaggtggaccgcctgcggaatgaggtgcagataaagcatgaagaggactacagggaagccctggttaccatcaagaatgacctaaagttgatagaaggcgtggatatcaaggagaaccttcaagaccagatccggcattggttcatcgaatgcagaaatttaaccgggacatttcctgactaccctgacgttgaagaaggagggtcagctattattttttctgacaagaccatacaacaggaagaagacgaaaaatggaaaatgtcaccaagtctttttcttcctgcaatgaaggaaggatgtaacgcatacaaagaaatctggatgaaaaaagatgagtcttggaatttctctcaggactatgatccagaactgatcaaagaggagaaacgaaaagaattacagtcagagatcaggatacaggttgatgagttgatgagacaggaacttaaaaacttaaagctagctgtggacagagaaagggagcgcccagtgaaagcaggaaagaaaaaggacaagaaaggaaagaaaggcaaaaagaaagagaagaaggcaaagaaggataaagatctgacagctgacaggaccatcgagtctctgtataaggaactggtggaagaaggattactgatccaggctctgaaagtcaacctctctgattacattggtgagtacagctacctggggactactcttcgccaggtgtccatagaacccatgccctccctcctggatgtcagacagctcatcacattgtacggaatctggccattaggttctgcagcagtgcatgagaaagctcctttggtgaaatcgctactgttagccgggccgtctggggtagggaagaaaatgctggtccatgccatctgcaccgaaacgggagccaacctcttcaacttgtcctcctctaacattgctgggaaataccctggcaaaaatggcctccaaatgatgctgcatgcagtcttcaaggtggctcgacagctccagccctccgtggtgtggattgaagacacagaaaaaaccttctacaaaaaagttcccaacgcagaaaagatgaatgaacctaaacgcctgaaaaaacaccttccccaaatcctgaaactcctgaaaccagatgaccggattctgattgtggggaccacacggcgtcccttcgatgctgaactccaatctttctgcaaagtttaccagaaaattattttggtgcccagaccagactatgcttccagatacgttctgtggaagcaaatcattgaacgcaatggaggagtcctcaccagtgccttgaatgtcagctgcctggcgaaggtcactgacggcttcacccaaggacatatagtcgaagtggttaaaggcgtgctcacagatcagagaatccggcggcaaattcataaacctctcactgcagttgagtttattacggcgataaccagcatgaatccagtgtacaaagaggaagaagagagctttaagaactggtatgccaaaactcctctgggtaaaaaacgtgccttggcgataacaggaggcagcacagaaaaggcaaaggacaaagggaaaaggaaataaaagaaagagaaaaaggcaaaaaagaaaaagtaatgcctttctgaagaaccatgcttgagtctctctgggatggagaggaccccaactcgcc

SEQ ID NO: 7303 - DNA, 836 bp, Homo sapiens
ttaaaccctgtggcggttactgcaatgtggtcatgcaaggctgtatggcaggtgtggtggagattgacaagtactggagagaatacattctgtcccttgaagaacttgtgaatggcatgtacagaatctatgacatggagaacgtactgcttggtctcttttcaacaatccatgattctatccagtatgtccagaagaatgcaggaaagctgaccaccactattggcaagttatgtgcccattctcaacaacgccaatatagatctgcttattatcctgaagatctctttattgacaagaaagtattaaaagttgctcatgtagaacatgaagaaaccttatccagccgaagaagggaactaattcagaagttgaagtctttcatcagcttctatagtgctttgcctggctacatctgcagccatagccctgtggcggaaaacgacaccctttgctggaatggacaagaactcgtggagagatacagccaaaaggcagcaaggaatggaatgaaaaaccagttcaatctccatgagctgaaaatgaagggccctgagccagtggtcagtcaaattattgacaaactgaagcacattaaccagctcctgagaaccatgtctatgcccaaaggtagagttctggataaaaacctggatgaggaagggtttgaaagtggagactgcggtgatgatgaagatgagtgcattggaggctctggtgatggaatgataaaagtgaagaatcagctccgcttccttgcaggtaactgattagtgctgacccaaatgtaatctaaaaatggtgatgctcaggaattaaaaataaattgaacccgc

SEQ ID NO: 7304 - DNA, 2160 bp, Homo sapiens
tgcaccctccgaggactgggagtcccgagtccagcttagggggagtgggggcgcgacccccaacccagaaaccttcacttgaccgctcaagttcgcggcagcagggcgggccgcgccgaatctcggcgtgcgcggagcggggagatgcaggcgagcgccagagcccgggctcgggggccctgcgccggggagaggagccgggacccaccggcggagccgaaaacaagtgtattcatattcaaacaaacggaccaattgcaccaggcggggagagggagcatccaatcggctggcgcgaggccccggcgctgctttgcataaagcaatattttgtgtgagagcgagcggtgcatttgcatgttgcggagtgattagtgggtttgaaaagggaaccgtggctcggcctcatttcccgctctggttcaggcgcaggaggaagtgttttgctggaggatgatgacagaggtcaggcttcgctaatgggccagtgaggagcggtggaggcgaggccgggcgccggcacacacacattaacacacttgagccatcaccaatcagcataggaatctgagaattgctctcacacaccaacccagcaacatccgtggagaaaactctcaccagcaactcctttaaaacaccgtcatttcaaaccattgtggtcttcaagcaacaacagcagcacaaaaaaccccaaccaaacaaaactcttgacagaagctgtgacaaccagaaaggatgcctcataaagggggaagactttaactaggggcgcgcagatgtgtgaggccttttattgtgagagtggacagacatccgagatttcagagccccatattcgagccccgtggaatcccgcggcccccagccagagccagcatgcagaacagtcacagcggagtgaatcagctcggtggtgtctttgtcaacgggcggccactgccggactccacccggcagaagattgtagagctagctcacagcggggcccggccgtgcgacatttcccgaattctgcaggtgtccaacggatgtgtgagtaaaattctgggcaggtattacgagactggctccatcagacccagggcaatcggtggtagtaaaccgagagtagcgactccagaagttgtaagcaaaatagcccagtataagcgggagtgcccgtccatctttgcttgggaaatccgagacagattactgtccgagggggtctgtaccaacgataacataccaagcgtgtcatcaataaacagagttcttcgcaacctggctagcgaaaagcaacagatgggcgcagacggcatgtatgataaactaaggatgttgaacgggcagaccggaagctggggcacccgccctggttggtatccggggacttcggtgccagggcaacctacgcaagatggctgccagcaacaggaaggagggggagagaataccaactccatcagttccaacggagaagattcagatgaggctcaaatgcgacttcagctgaagcggaagctgcaaagaaatagaacatcctttacccaagagcaaattgaggccctggagaaagagtttgagagaacccattatccagatgtgtttgcccgagaaagactagcagccaaaatagatctacctgaagcaagaatacaggtatggttttctaatcgaagggccaaatggagaagagaagaaaaactgaggaatcagagaagacaggccagcaacacacctagtcatattcctatcagcagtagtttcagcaccagtgtctaccaaccaattccacaacccaccacaccggtttcctccttcacatctggctccatgttgggccgaacagacacagccctcacaaacacctacagcgctctgccgcctatgcccagcttcaccatggcaaataacctgcctatgcaacccccagtccccagccagacctcctcatactcctgcatgctgcccaccagcccttcggtgaatgggcggagttatgatacctacacccccccacatatgcagacacacatgaacagtcagccaatgggcacctcgggcaccacttcaacaggactcatttcccctggtgtgtcagttccagttcaagttcccggaagtgaacctgatatgtctcaatactggccaagattacagtaaaaaaaaaaaaaa

SEQ ID NO: 7305 - DNA, 875 bp, Homo sapiens
ttctttcccgagcttggaacttcgttatccgcgatgcgtttcctggcagctacattcctgctcctggcgctcagcaccgctgcccaggccgaaccggtgcagttcaaggactgcggttctgtggatggagttataaaggaagtgaatgtgagcccatgccccacccaaccctgccagctgagcaaaggacagtcttacagcgtcaatgtcaccttcaccagcaatattcagtctaaaagcagcaaggccgtggtgcatggcatcctgatgggcgtcccagttccctttcccattcctgagcctgatggttgtaagagtggaattaactgccctatccaaaaagacaagacctatagctacctgaataaactaccagtgaaaagcgaatatccctctataaaactggtggtggagtggcaacttcaggatgacaaaaaccaaagtctcttctgctgggaaatcccagtacagatcatgttcccatgcctgttctctgctcactgcccaatgctagccacagagcacaggtgtttgcagttgcaaatggagactaagagcctgagattctggagcagacgtggcatgtcagtgtggctcccctcacctgcaggggcttggagaaggacggctcccttctagcaggccgtcctccacaaatcatatgtcccagataagcagccagcaggcagaaagatcagcttagctctgactgccagtgggtaaggccaagaaggagcctggcagacaaatggatggctgctggccttgaacatggcagagctgctgggtgtgccagatcaaaaagcagagagcaggccagcagcagcagactgttctcagcgctggagaaatgcattgctctgcccactacaccc

SEQ ID NO: 7306 - DNA, 2169 bp, Homo sapiens
actgggactatagggtatgctaccatgcccggctaatttttttactttttgtagagatggggacccactgtgttgcccaggcctgtcttgaaccactgggctcaagtgatcctccctccttagccttccgaagtactgggattgcaggtgtgaaccactgtgcccggctttagacttaaatgttttatcaggcttgaaatcctagctctttaaagattttgttttaaatgccgggtgcaagagcctgggaacaatttcacttaggtgcctgtgaatatcaaagtttcaatttctggcaaatggtttaaaatagaaatccaatttgtccatgctatgcaaaccatctgaattagaatgtaatgagtaaagcttaaaccttaggtctgtatttaaccacattgtgttacttacttgcccccacatcctttcacacacgaagttgagaatagggtaaataaatgagcctgttcagctaatactcttggcttgaccctttcacacttaacagcaccagccaagaaacctgaatgtgagcccaaatagtgtctattttgatacctgaaaatcactggccaccttgctgatgggcaactcccttcatcactggtttaactctcttgtgccatagggtatctagaagcaaaatatgtttgttaagtgtaaagctgtctctgcttaaaaacaagtccccctaccaccaccaccacacacacacacacacacacacacacacacacacacacacacacacacacacgaaattgcctgttcctgggctgataggacaccagttaagtagaaacaggagtatggaagagtgtgaacgttgagcttggggatcaaaaatttgaggatatgtaagaaattaataggagaatcaaataataaacttgatttcctccagctctccctaattgtagttacataaagttacaacttgactaaaactacaaggaagatgttgacatgctcttcctccatttaagaagccataatgataaaactctaagaacaagaaaggtttgtggagcatttatggaacaaatttttgctgcctaggtaaaatttattctaaaggccttaatctggtcattattccccttttctctagactataatgtaactgcaaactccaagctggtcattatcacggctggggcacgtcagcaagagggagaaagccgtcttaatttggtccagcgtaacgtgaacatctttaaattcatcattcctaatgttgtaaaatacagcccgaactgcaagttgcttattgtttcaaatccagtggatatcttgacctacgtggcttggaagataagtggttttcccaaaaaccgtgttattggaagcggttgcaatctggattcagcccgattccgttacctaatgggggaaaggctgggagttcacccattaagctgtcatgggtgggtccttggggaacatggagattccagtgtgcctgtatggagtggaatgaatgttgctggtgtctctctgaagactctgcacccagatttagggactgataaagataaggaacagtggaaagaggttcacaagcaggtggttgagagtgcttatgaggtgatcaaactcaaaggctacacatcctgggctattggactctctgtagcagatttggcagagagtataatgaagaatcttaggcgggtgcacccagtttccaccatgattaagggtctttacggaataaaggatgatgtcttccttagtgttccttgcattttgggacagaatggaatctcagaccttgtgaaggtgactctgacttctgaggaagaggcccgtttgaagaagagtgcagatacactttgggggatccaaaaggagctgcaattttaaagtcttctgatgtcatatcatttcactgtctaggctacaacaggattctaggtggaggttgtgcatgttgtcctttttatctgatctgtgattaaagcagtaatattttaagatggactgggaaaaacatcaactcctgaagttagaaataagaatggtttgtaaaatccacagctatatcctgatgctggatggtattaatcttgtgtagtcttcaactggttagtgtgaaatagttctgccacctctgacgcaccactgccaatgctgtacgtactgcatttgccccttgagccaggtgga

SEQ ID NO: 7307 - DNA, 768 bp, Homo sapiens
gtgagtcaccaaggaaggcagcggcagctccactcagccagtacccagatacgctgggaaccttccccagccatggcttccctggggcagatcctcttctggagcataattagcatcatcattattctggctggagcaattgcactcatcattggctttggtatttcagaagtctctgtctggctttcagcaatgaagggtttggttgtagaagttccaaggcttcccttagcattgatctttgcttcctgaactgcagggagacactccatcacagtcactactgtcgcctcagctgggaacattggggaggatggaatcctgagctgcacttttgaacctgacatcaaactttctgatatcgtgatacaatggctgaaggaaggtgttttaggcttggtccatgagttcaaagaaggcaaagatgagctgtcggagcaggatgaaatgttcagaggccggacagcagtgtttgctgatcaagtgatagttggcaatgcctctttgcggctgaaaaacgtgcaactcacagatgctggcacctacaaatgttatatcatcacttctaaaggcaaggggaatgctaaccttgagtataaaactggagccttcagcatgccggaagtgaatgtggactataatgccagctcagagaccttgcggtgtgaggctccccgatggttcccccagcccacagtggtctgggcatcccaagttgaccagggagccaacttctcggaagtctccaataccagctttgagctgaac

SEQ ID NO: 7308 - DNA, 3391 bp, Homo sapiens
agtatccccaggcgccttaacaataagcagcgggttacagaggaaatcgagtctctccgtggcgcttccaggctgaggacccagcgcctaccggccgagcaccccctagggcagaggggcgagggagacccgcgggaaggggcagcaagccgcctgattgacagcccgaaatctgatcttgtgaaagagacgcggagccaatgggaggcagcgatccatcagtttggattggaggcccctggaggagaagtagaggaaaaaccaccgaattgagctctgtcagaggcgctttcggcttccaagggggaagtgctgggctataattaatgtttttattaaatttggagggaagtttttgcagcctttcgcctagcgtggccttcaggttgatagaagtccagatcctgaggaaatctccagctaaatgctcaaaatataaaatactgagctgagatttgcgaagagcagcagcatggatggattttatgaccagcaagtgccttacatggtcaccaatagtcagcgtgggagaaattgtaacgagaaaccaacaaatgtcaggaaaagaaaattcattaacagagatctggctcatgattcagaagaactctttcaagatctaagtcaattacaggaaacatggcttgcagaagctcaggtacctgacaatgatgagcagtttgtaccagactatcaggctgaaagtttggcttttcatggcctgccactgaaaatcaagaaagaaccccacagtccatgttcagaaatcagctctgcctgcagtcaagaacagccctttaaattcagctatggagaaaagtgcctgtacaatgtcagtgcctatgatcagaagccacaagtgggaatgaggccctccaacccccccacaccatccagcacgccagtgtccccactgcatcatgcatctccaaactcaactcatacaccgaaacctgaccgggccttcccagctcacctccctccatcgcagtccataccagatagcagctaccccatggaccacagatttcgccgccagctttctgaaccctgtaactcctttcctcctttgccgacgatgccaagggaaggacgtcctatgtaccaacgccagatgtctgagccaaacatccccttcccaccacaaggctttaagcaggagtaccacgacccagtgtatgaacacaacaccatggttggcagtgcggccagccaaagctttccccctcctctgatgattaaacaggaacccagagattttgcatatgactcagaagtgcctagctgccactccatttatatgaggcaagaaggcttcctggctcatcccagcagaacagaaggctgtatgtttgaaaagggccccaggcagttttatgatgacacctgtgttgtcccagaaaaattcgatggagacatcaaacaagagccaggaatgtatcgggaaggacccacataccaacggcgaggatcacttcagctctggcagtttttggtagctcttctggatgacccttcaaattctcattttattgcctggactggtcgaggcatggaatttaaactgattgagcctgaagaggtggcccgacgttggggcattcagaaaaacaggccagctatgaactatgataaacttagccgttcactccgctattactatgagaaaggaattatgcaaaaggtggctggagagagatatgtctacaagtttgtgtgtgatccagaagcccttttctccatggcctttccagataatcagcgtccactgctgaagacagacatggaacgtcacatcaacgaggaggacacagtgcctctttctcactttgatgagagcatggcctacatgccggaagggggctgctgcaacccccacccctacaacgaaggctacgtgtattaacacaagtgacagtcaagcagggcgtttttgcgcttttccttttttctgcaagatacagagaattgctgaatctttgttttatttctgttgtttgtattttatttttaaataataatacacaaaaaggggcttttcctgttgcattattctatggtctgccatggactgtgcactttatttgagggtgggtgggagtaatctaaacatttattctgtgtaacaggaagctaatgggtgaatgggcagagggatttggggattactttttacttaggcttgggatggggtcctacaagttttgagtatgatgaaactatatcatgtctgtttgatttcataacaacataagataatgtttattttatcggggtatctatggtacagttaatttcacgttgtgtaaatatccacttggagactatttgccttgggcattttcccctgtcatttatgagtctctgcaggtgtacaaaaaaaccccaatctactgtaaatggcagtttaattgttagaaatgactgtttttgcaccacttgtaaaaaggtatttagcgattgcatttgctgtttgttgttttattttgctttatatatgacttgcagaggataaccataaaatgggtaattctctctgaagttgaataatcaccatgactgtaaatgaggggcacaattttggactctggcgccaaactgagtcataggccagtagcattacgtgtatctggtgccaccttgctgtttagatacaaatcataccgtcttttaaatattttgaagcccatttcagttaaataatgacatgtcatggtcctttggaatcttcatttaaatgttaaatctggaatcaaaatgaagcaaaaaatatctgtctccttttcactttcttcagtacataaatacattatttaatcaataagaattaactgtactaaatcatgtattatgctgttctagttacagcaaacactctttaagaaaaatatccaatacactaaataggtactatagtaatttttagacatggtacccattgatatgcatttaaaccttttactgctgtgttatgttgataacatatataaatattagataatgctaatgcttctgctgctgtcttttctgtaatattctctttcatgctgaatttactatgaccatttataagcagtgcagttaactacagatagcatttcaggacaaaatagatgactcaaaccatttattgcttaaaaaatagcttacgccatgctatgctataagcagcttttatgcacattgacaaatgaagagtaagcttcagcttgctaaaggaaactgtggaaccttttgtaacttttggtgatatggaaaattatttacaaaccgtcaaagaatatgaggaagttgctgtatgacatagtgctggcactgatattatccatcatctctttttggacacttctgtaaatgtgattggattgtttgaaagaagatttaaagtttc

SEQ ID NO: 7309 - DNA, 2875 bp, Homo sapiens
attttctcctggacaaggagagagtgcggctgctgagagccgagcccagcaatcccgatcctctgagtcgtgaagaagggaggcagcgagggggttggggttggggcctgaggcaagcccccaggctccgctcttgccagagggacaggagccatggctcagaaaatggactgtggtgcgggcctcctcggcttccagaatcctgacgcttgtagagcagtctgtcaccccctcccccagcctcctgcctccaccctccctctttctgcattccccactctgtgcgaccccccttattctcaactccgcgatccgcctgccgtcctgagctgctactgcacgcctcttggagcgtccccggctcctgctgaggcctccgtagaagacagcgccttgcttatgcagaccttgatggaggccatccagatctcagaggctccacctactaaccaggccaccgcagctgctagtccccagagttcacagcccccaactgccaatgagatggctgacattcaggtttcagcagctgccgctaggcctaagtcagcctttaaagtccagaatgccaccacaaaaggcccaaatggtgtctatgatttctctcaggctcataatgccaaggatgtgcccaacacgcagcccaaggcagcctttaagtcccaaaatgctaccccaaagggtccaaatgctgcctatgatttttcccaggcagcaaccactggtgagttagctgctaacaagtctgagatggccttcaaggcccagaatgccactactaaagtgggcccaaatgccacctacaatttctctcagtctctcaatgccaatgacctggccaacagcaggcctaagacccctttcaaggcttggaatgataccactaaggccccaacagctgatacccagacccagaatgtaaatcaggccaaaatggccacttcccaggctgacatagagaccgacccaggtatctctgaacctgacggtgcaactgcacagacatcagcagatggttcccaggctcagaatctggagtcccggacaataattcggggcaagaggacccgcaagattaataacttgaatgttgaagagaacagcagtggggatcagaggcgggccccactggctgcagggacctggaggtctgcaccagttccagtgaccactcagaacccacctggcgcaccccccaatgtgctctggcagacgccattggcttggcagaacccctcaggctggcaaaaccagacagccaggcagaccccaccagcacgtcagagccctccagctaggcagaccccaccagcctggcagaacccagtcgcttggcagaacccagtgatttggccaaacccagtaatctggcagaacccagtgatctggccaaaccccattgtctggcccggccctgttgtctggccgaatccactggcctggcagaatccacctggatggcagactccacctggatggcagaccccaccgggctggcagggtcctccagactggcaaggtcctcctgactggccgctaccacccgactggccactgccacctgattggccacttcccactgactggccactaccacctgactggatccccgctgattggccaattccacctgactggcagaacctgcgcccctcgcctaacctgcgcccttctcccaactcgcgtgcctcacagaacccaggtgctgcacagccccgagatgtggcccttcttcaggaaagagcaaataagttggtcaagtacttgatgcttaaggactacacaaaggtgcccatcaagcgctcagaaatgctgagagatatcatccgtgaatacactgatgtttatccagaaatcattgaacgtgcatgctttgtcctagagaagaaatttgggattcaactgaaagaaattgacaaagaagaacacctgtatattctcatcagtacccccgagtccctggctggcatactgggaacgaccaaagacacacccaagctcggtctcctcttggtgattctgggtgtcatcttcatgaatggcaaccgtgccagtgaggctgtcctctgggaggcactacgcaagatgggactgcgtcctggggtgagacatcccctccttggagatctaaggaaacttctcacctatgagtttgtaaagcagaaatacctggactacagacgagtgcccaacagcaaccccccggagtatgagttcctctggggcctccgttcctaccatgagactagcaagatgaaagtgctgagattcattgcagaggttcagaaaagagaccctcgtgactggactgcacagttcatggaggctgcagatgaggccttggatgctctggatgctgctgcagctgaggccgaagcccgggctgaagcaagaacccgcatgggaattggagatgaggctgtgtctgggccctggagctgggatgacattgagtttgagctgctgacctgggatgaggaaggagattttggagatccctggtccagaattccatttaccttctgggccagataccaccagaatgcccgctccagattccctcagacctttgccggtcccattattggtcctggtggtacagccagtgccaacttcgctgccaactttggtgccattggtttcttctgggttgagtgagatgttggatattgctatcaatcgcagtagtctttcccctgtgtgaggctgaagcctcagattccttctaaacacagctatctagagagccacatcctgttgactgaaagtggcatgcaagataaatttatttgctgttccttgtctactgctttttttccccttgtgtgctgtcaagttttggtatcagaaataaacattgaaattgcaaagtgaa

SEQ ID NO: 7310 - DNA, 550 bp, Homo sapiens
gtcaactttgtagtgtgccaactctttgccttgctagcagccatttggtttcgaacttatctacattcaagcaaaactagctcttttataagacatgtagttgctacccttttgggcctttatcttgcacttttttgctttggatggtatgccttacactttcttgtacaaagtggaatttcctactgtatcatgatcatcataggagtggagaacatgcacaattactgctttgtgtttgctctgggatacctcacagtgtgccaagttactcgagtctatatctttgactatggacaatattctgctgatttttcagggtccttgggctaggtcagtctgagtttcctagagaaggcgctcaagagtgcgttttacttctatgcatttcacctattttcagtgttctccattcaacaccagtattcagttgagtagtggaaataatttctggcatttgttccttcaaaggggatgtattttcttcctggtactagatgaatctttttgtcctgtaacaaaactgattatatgtctgttgtgaaataaa

SEQ ID NO: 7311 - DNA, 752 bp, Homo sapiens
ctggacgcagcagccaccgccgcgtccctctctccacgaggctgccggcttaggacccccagctccgacatgtcgccctctggtcgcctgtgtcttctcaccatcgttggcctgattctccccaccagaggacagacgttgaaagataccacgtccagttcttcagcagactcaactatcatggacattcaggtcccgacacgagccccagatgcagtctacacagaactccagcccacctctccaaccccaacctggcctgctgatggcgcctatatcacagcttatggagtcacacacttcttgatgaacatgttggctgtttccagctttttctgtctacacacagcaccacaatgagcaactttgtcccttcctccttgagcaaacgcacttggaatatgtactgactatgtgctggtcatggttctaaatattttgcgtatgttaactcattcaaccttcacgcaaaccctaagaggcagaaattaccattgtccccattttacagacaaggaaacagaggctgtgagtaactggttcaaggtctcacaacaagtcagggacgcagctggaatcgaagtccaggaatctggcaccagagcctgtgcttttatccaagacaatacagggcaaaggacatgcatgcttaatgttttaaaatttgccctcctgccgcccaggcacagtggctcatgcctgtcatcccagcacttttggaggctgaggcgggtggatcgcttgagcccagg

SEQ ID NO: 7312 - DNA, 1812 bp, Homo sapiens
atttcatttcttccactaaagcgtttgcggagacttcaaggtataatctatcccagatcctttcccagagagaaacttggcgatcacgttttcacatgatgctcacgctcagggcgcttcaattatccctccccacaaagataggtggcgcgtgtttcagggtctctcgtctctctcctacagaaaagaaaaagaaaaaaatgtcattagaagaggcgtaacacgtcagtccgtccccaggtttgtgtttcctggagtggccgaaagagatcagttctaacctgctctgcaggaataacggtcctgcctcccgacactcttggcgaggtttttgtacagtttgctccgggagctgtttcttcgcttccacctttttctcccccacacttcgcggcttcttcatgctttttcttctcaccatttctggccaaaactacaaacaagacttcgcagatcgagcctgcgtgctgccgaagcagggcgccgagtccatgcgaactgccatctgatccgctcttatcaatgaagcagccgatcatggcggatggcccccggtgcaagaggcgcaaacaagccaatcccaggaggaaaaacgtggtgaactatgacaatgtagtggacacaggttctgaaacagatgaggaagacaagcttcatattgctgaggatgacggtattgccaaccctctggaccaggagacgagtccagctagtgtgcccaaccatgagtcctccccacacgtgagccaagctctgttgccaagagaggaagaggaagatgaaataagggagggtggagtggaacacccctggcacaacaacgagattctacaagcctctgtagatggtccagaagaaatgaaggaagactatgacactatggggccagaagccacgatccagaccgcaattaacaatggtacagtgaagaatgcaaattgcacatcagattttgaggaatactttgccaaaagaaaactggaggaacgcgatggtcatgcagtcagcatcgaggagtaccttcagcgcagtgacacagccattatttacccagaagcccctgaggagctgtctcgccttggcacgccagaggccaatgggcaagaagaaaatgacctgccacctggaactccagatgcttttgcccaactgctgacctgcccctactgcgaccggggctacaagcgcttgacatcactgaaggagcacatcaagtaccgccacgagaagaatgaagagaacttttcctgccctctctgtagctacacgtttgcctaccgcacccagctcgagcggcatatggtgacacacaagccagggacagatcagcaccaaatgctaacccaaggagcaggtaatcgcaagttcaaatgcacagagtgtggcaaggccttcaaatataaacaccatctgaaagaacacctgcgaattcacagtggtgaaaaaccttacgagtgcccaaactgcaagaaacgtttctcccattctggttcctacagttcgcacatcagcagcaagaaatgtattggtttaatctctgtaaatggccgaatgagaaacaatatcaagacgggttcttcccctaattctgtttcttcttctcctactaattcagccattacccagttaagaaacaagttggagaatggaaaaccacttagtatgtctgaacagacaggcttacttaaaagcggccgggcgcagtggctcacgcctttaatcccagcacttttggaggctgaggtaggcagatcacgaggtcagaagatcgagactctcctggctaacatggtggaaccccgtctctactaa

SEQ ID NO: 7313 - DNA, 1206 bp, Homo sapiens
tcctcacaattactctacagctcagaacaccaactgctgaggctgccttgggaagaggatgatcctaaacaaagctctgctgctgggggccctcgctctgaccaccgtgatgagcccctgtggaggtgaagacattgtggctgaccacgttgcctcttgtggtgtaaacttgtaccagttttacggtccctctggccagtacacccatgaatttgatggagatgagcagttctacgtggacctggagaggaaggagactgcctggcggtggcctgagttcagcaaatttggaggttttgacccgcagggtgcactgagaaacatggctgtggcaaaacacaacttgaacatcatgattaaacgctacaactctaccgctgctaccaatgaggttcctgaggtcacagtgttttccaagtctcccgtgacactgggtcagcccaacaccctcatttgtcttgtggacaacatctttcctcctgtggtcaacatcacatggctgagcaatgggcagtcagtcacagaaggtgtttctgagaccagcttcctctccaagagtgatcattccttcttcaagatcagttacctcaccttcctcccttctgctgatgagatttatgactgcaaggtggagcactggggcctggaccagcctcttctgaaacactgggagcctgagattccagcccctatgtcagagctcacagagactgtggtctgtgccctggggttgtctgtgggcctcatgggcattgtggtgggcactgtcttcatcatccaaggcctgcgttcagttggtgcttccagacaccaagggccattgtgaatcccatcctggaagggaagggctgactgaaactatggctaataattggggtactcttatgtttcaatccaatttaacctcatttcccagatcatttttcatgtccagtaacacagaagccaccaagtacagtatagcctgataatatgttgatttcttagctgacattaatatttcttgcttccttgtgttcccacccttggcactgccacccacccctcaattcaggcaacaatgaaattaatggataccgtctgcccttggcccagaattgttatagcaaaaattttagaaccaaaaaataagtctgtactaatttcaatgtggcttttaaaagtatgacagagaaataagttaggataaaggaaatttgaatctca

SEQ ID NO: 7314 - DNA, 572 bp, Homo sapiens
gtcacttccctggtcactttagcctggggatcatttccaagtagtatagttgcagatcttcgaacgccattcctgtgttctgtgaattcaagacaacatgggttttataaccctttgactctgctcagcatctcccagatcaagcaggaggccaggagcccagcctcttgtagaaacagcgagggtataactgccctcccgttctgcccccaagacgaaggaggactctcggaagccaagaaaggtttaagaagtctttctggatagagagcagtgcccaggcaggaagcctttcgccggcagagcggggtccaaggacgagctggagaggacagaggcgcgatgggcctgctgcagggcctgctccgagtccggaagctgctgctggtcgtctgcgtcccgctcctgctgctgcctctgcccgtcctccaccccagcagcgaggcctcgtgtgcttacgtgctgatcgtgactgctgtgtactgggtgtcggaggcagtgcctctgggagctgcagccctggtgccggccttcctttacccgttcttcggagtcctccggtccaatgaggt

SEQ ID NO: 7315 - DNA, 1779 bp, Homo sapiens; identical to SEQ ID NO: 3844

SEQ ID NO: 7316 - DNA, 3337 bp, Homo sapiens; identical to SEQ ID NO: 1704

SEQ ID NO: 7317 - DNA, 4610 bp, Homo sapiens
agccttagccatccttaaactcatccaaccgattcccatttccgcgggtgcttggcttagtgctgagacgggattccgccgttggtattcaggtccaacactaagactgtgtccatgttagaactcatagaagttaatggaacccctggtagtcagctctctactccgcgctcaggcaagtcgccaagcccatcacccaccagcccaggaagcctgcggaagcagaggagctctcagcatggcggctcctctacgtcacttgcgtccaccaaagtctgcagctcgatggatgagaacgatggccctggagaagaagtgtcggaggaaggcttccagattccagctacaataacagaacgatataaagtcggaagaacaataggagatggaaattttgctgttgtcaaggaatgtgtagaaagatcgactgctagagagtatgctctgaaaattatcaagaaaagcaaatgtcgaggcaaagagcacatgatccagaatgaagtgtctattttaagaagagtgaagcatcccaatatcgttcttctgattgaggagatggatgtgccaactgaactgtatcttgtcatggaattagtaaaggggggagacctttttgatgccattacttccactaacaaatacaccgagagagacgccagtgggatgctgtacaacctagccagcgccatcaaatacctgcatagcctgaacatcgtccaccgtgatatcaagccagagaacctgctggtgtatgagcaccaagatggcagcaaatcactgaagctgggtgactttggactggccaccattgtagacggccccctgtacacagtctgtggcaccccaacatacgtggctccagaaatcattgcagagactggatacggcctcaaggtggacatctgggcagcaggtgtaatcacttatatcctgctgtgtggtttccctccattccgtggaagtggtgatgaccaggaggtgctttttgatcagattttgatggggcaggtggactttccttctccatactgggataatgtttccgattctgcaaaggagctcattaccatgatgctgttggtcgatgtagatcagcgattttctgctgttcaagtacttgagcatccctgggttaatgatgatggcctcccagaaaatgaacatcagctgtcagtagctggaaagataaagaagcatttcaacacaggccccaagccgaatagcacagcagctggagtttctgtcatagcaaccaccgctcttgataaggagaggcaggttttccgacgaagacgcaaccaggatgtgaggagccggtacaaggcgcagccagctcctcccgaactcaactcggaatcggaagactactccccaagctcctccgagactgttcgctcccctaactcgcccttttaataagacccttttactcaaagtcctagcttaaccctttgagactctgagatttttttcccccaaatttgtgtaaaacagtttcatctgatctatctagcgctcaatgcttgaatggcagaactgaaagtgttttcaggtatctttgtagcggtttccctttactgaataagatgacacgtggtgattgtgaagatggtaatttgctgctaatagagtcctcaaagggttaaggccaatttgcaatttttttttaaacttagaagcaatgaatgttttcatcagtcaagctaggatctgcagtatgtaatatagcacttgttaaccctctgagtgcatagaattttattgagaattcttgtttgggaatttttcaggcctttggatgtatacacacatgtttcttgattttactgcagatcaaggggtgttgttagatgctgaaatgtccagaaaagaaggacatttagaatgatatcttgtttgtccttttctgtgggtttagaacgtggcaggtttataacttcgacacacgcacggttctttcttcttcacaatcctattcagaaacagattttttttttcattagagatatgactgtcagttgcagtgagttctgcatcccaagtggagggaattgggtttgtggcaaagagcttgacccaggaaatagatggtgccccccaaattgtctccacatgaagatgtactgatgacgccccagaaatgctgcttccatatcagctgctgctagcgccagcgcagactctcagggagtcaccacagcttgtcttgtgcttggtgagtgagggtctctctactcagtgtcagacatctacaggaaagaaacaactggtggaaaagagcaataaattgcccggtgctctgcagggctggaatttcaaacagaaagagggaataagatcctgtgatttttctcacctgcttttccacgcactgtggtcatcactgtgcaatctacatctagtatgaaatccacacataggagagctggggcacaaggggactggaggcagttgctttgcaagatggctgaggagaaagcacactgggaacacaatccagaatgttctaacaataagttttcagtgaataaaccactggcaagacaattccatgtgcacctttaggttacctatatagtctcctaggaagatcaggatgaaagacctagatgatacccctgaggataaaacctccatcccctaaaatgattttttttaaataccactgtctttagctgtccaggaggtcagagtgttttttctgtctttgggccaagtcctgtctgagacctgtattttcactcttgttaccaaatctatctccctagtgcagtgtctccaggcctgagtttcttctggaacagattccattttagaatggggattcacaggttctgtgcatcaccacagtgctcagagaggattctcctggggtgtcttagaggcaggtgcccaactcaaatgtattcccaaggtttgctgggctctgggatccacgagacaaccagagagggatatctcatgaaatttgcatctggtggctgaacagtacctatgttctctgttttgaatatactttaatacctgagagtcttaaaatttgtgaacaacgtttctatagtcctttattttcaaatgcacattgatcttcacttgctgcatttttactcttcaaccctgaaactatggtctacattaatatggatttttaaatcacatgtcattacttttgcaacaccatcaccaaaattttttgctcttttacatttaggttcatctctgtggtctgtgttgtcctgacatgtaaaaagcatatcgtttattgaggtttttttcccccccttttagagcatccggaagtgataacacgcaaaatcacaaagtagcataaatcagtaaattagttgagttgtttttgggggggaggtgggggtagggggcacagaacaccagaaagagtgttggtgtgtaggtagattccatattaatgaggaacactgaactagttggaaattactgctttctctagaaatataaagcaaagcactattccaaggctatggagtagctctacagcctggcctcaactctaaaagtgtgaagaatgcaatgggcagagacctacctgcagtggactgtcattttcctttctttctctgaattactgctttttctgtgggcattaactatattgctacagcatctagtgtactgagcctgcggtgcatggctcaggccttttcccatcgacgtctagggggactctggaccgtgtgaagctagggggtgtttctcagcacactgcagaagggcagctcagaagaatgcagggcccattcagcatggggatcccagcacatcactgtagaatttgagtgatctatgctgaataaacagtggaatgtgaccagtcaagtagaaatcttgagtaatcagatggaatgcaatctttctaacattaagctaccaagatcctgaatgtcagagatgtactcagagggttaacagacaagcacaaggcatgctgactacattggtgtatccagattgctttgcttttagccagtgctttctaatttttttctcgacattcttgggatagttcaagtttgaaataattaagtggtggtgttctttaaggaatttctataaccaaattgatcttatttttgatttcacttatcatagaacaaatatgtatcattatggcagtgtatctatgtaattatcaatttaatcatcaccaccggtgtttccatattttttcccaagtatttaatatagctctcttatggtggtggcctggtgatggggaccgtctttcttttactgacacatgaccaatcatatggtattttcaagggaattttaagattcatcttttcagtttgatagtagactagttaaggaagaactctttcattacttgcatcgtgtaaatcatctctgtagacatgtgttcatattaatgaacacattttttctcaacattgtagcagaaatcattttattcgtcatgatcaatgaatatgtgatttgctccagatcgttagaaggaaaagtaagatttcagtcatcaaaaatgtttttaccgtagccctcatctaacttacacgtggtgcatattaaaataagcagagaaaaaaaaatgtgaataaactactgaaaac

SEQ ID NO: 7318 - DNA, 421 bp, Homo sapiens
ggaaggcggggacccggggcaaggtggcagccaccaagcaggcccaacgtggttcttccaacgtcttttccatgtttgaacaagcccagatacaggagttcaaagaaggaaggtgagtgtcccagaggaggagctggacgccatgctgcaagagggcaagggccccatcaacttcaccgtcttcctcacgctctttggggagaagctcaatgggacagaccccgaggaagccatcctgagtgccttccgcatgtttgaccccagcggcaaaggggtggtgaacaaggatgagtaagtatgggcccagccagatgaggagcaccgtggtggaagcagagagcggggtgaggcccctagtgaggggggctgcctgtgcttcggggccttacactgctctttggggtgcagccaacccttccct

SEQ ID NO: 7319 - DNA, 1025 bp, Homo sapiens; identical to SEQ ID NO: 6638

SEQ ID NO: 7320 - DNA, 5575 bp, Homo sapiens
ttacctgggagaagacatagacttggacctccaggatcacagggaccaagaggagagcgagggccaaaaggaagacctggccctcgtggacctcagggaattgatggagaaccaggtgttcctggtcaacctggtgctccaggtggtgcaggacctacaggacctcctggtgaacctggtgatcctggaccaatgggtccgattggttcacgtggaccagagggccctcctggtaaacctggggaagatggtgaacctggcagaaatggaaatcctggtgaagtgggatttgcaggatctccgggagctcgtggatttcctggggctcctggtcttccaggtctgaagggtcaccgaggacacaaaggtcttgaaggccctaaaggtgaagttggagcacctggttccaagggagaagcaggtcctacagggcccagaggtgacccaggaacagttggtcctccagggccagtgggagaaaggggtgctcctggcaatcgtggttttccaggctctgatggtttacctgggccaaagggtgctcaaggagaacggggtcctgtaggttcttcaggacccaaaggaagccagggggatccaggacgtccaggggaacctgggcttccaggtgctcggggtttgacaggaaatcctggtgttcaaggtcctgaaggaaaacttggacctttgggtgcgccaggggaagatggccgtccaggtcctccaggctccataggaatcagagggcagcccgggagcatgggccttccaggccccaaaggtagcagtggtgaccctgggaaacctggagaagcaggaaatgctggagttcctgggcagaggggagctcctggaaaagatggtgaagttggtccttctggtcctgtgggcccgccgggtctagctggtgaaagaggagaacaaggacctccaggccccacaggttttcaggggcttcctggtcctccagggcctcctggagaaggtggaaaaccaggtgatcaaggtgttcctggagatcccggagcagttggcccgttaggacctagaggagaacgaggaaatcctggggaaagaggagaacctgggataactggactccctggtgagaagggaatggctggaggacatggtcctgatggcccaaaaggcagtccaggtccatctgggacccctggagatacaggcccaccaggtcttcaaggtatgccgggagaaagaggaattgcaggaactcctggccccaagggtgacagaggtggcataggagaaaaaggtgctgaaggcacagctggaaatgatggtgcaagaggtcttccaggtcctttgggccctccaggtccggcaggtcctactggagaaaagggtgaacctggtcctcgaggtttagttggccctcctggctcccggggcaatcctggttctcgaggtgaaaatgggccaactggagctgttggttttgccggaccccagggtcctgacggacagcctggagtaaaaggtgaacctggagagccaggacagaagggagatgctggttctcctggaccacaaggtttagcaggatcccctggccctcatggtcctaatggtgttcctggactaaaaggtggtcgaggaacccaaggtccgcctggtgctacaggatttcctggttctgcgggcagagttggacctccaggccctgctggagctccaggacctgcgggacccctaggggaacccgggaaggagggacctccaggtcttcgtggggaccctggctctcatgggcgtgtgggagatcgaggaccagctggcccccctggtggcccaggagacaaaggggacccaggagaagatgggcaacctggtccagatggcccccctggtccagctggaacgaccgggcagagaggaattgttggcatgcctgggcaacgtggagagagaggcatgcccggcctaccaggcccagcgggaacaccaggaaaagtaggaccaactggtgcaacaggagataaaggtccacctggacctgtggggcccccaggctccaatggtcctgtaggggaacctggaccagaaggtccagctggcaatgatggtaccccaggacgggatggtgctgttggagaacgtggtgatcgtggagaccctgggcctgcaggtctgccaggctctcagggtgcccctggaactcctggccctgtgggtgctccaggagatgcaggacaaagaggagatccgggttctcggggtcctataggaccacctggtcgagctgggaaacgtggattacctggaccccaaggacctcgtggtgacaaaggtgatcatggagaccgaggtgacagaggtcagaagggccacagaggctttactggtcttcagggtcttcctggccctcctggtccaaatggtgaacaaggaagtgctggaatccctggaccatttggcccaagaggtcctccaggcccagttggtccttcaggtaaagaaggaaaccctgggccacttgggccaattggacctccaggtgtacgaggcagtgtaggagaagcaggacctgagggccctcctggtgagcctggcccacctggccctccgggtccccctggccaccttacagctgctcttggggatatcatggggcactatgatgaaagcatgccagatccacttcctgagtttactgaagatcaggcggctcctgatgacaaaaacaaaacggacccaggggttcatgctaccctgaagtcactcagtagtcagattgaaaccatgcgcagccccgatggctcgaaaaagcacccagcccgcacgtgtgatgacctaaagctttgccattccgcaaagcagagtggtgaatactggattgatcctaaccaaggatctgttgaagatgcaatcaaagtttactgcaacatggaaacaggagaaacatgtatttcagcaaacccatccagtgtaccacgtaaaacctggtgggccagtaaatctcctgacaataaacctgtttggtatggtcttgatatgaacagagggtctcagttcgcttatggagaccaccaatcacctaatacagccattactcagatgacttttttgcgccttttatcaaaagaagcctcccagaacatcacttacatctgtaaaaacagtgtaggatacatggacgatcaagctaagaacctcaaaaaagctgtggttctcaaaggggcaaatgacttagatatcaaagcagagggaaatattagattccggtatatcgttcttcaagacacttgctctaagcggaatggaaatgtgggcaagactgtctttgaatatagaacacagaatgtggcacgcttgcccatcatagatcttgctcctgtggatgttggcggcacagaccaggaattcggcgttgaaattgggccagtttgttttgtgtaaagtaagccaagacacatcgacaatgagcaccaccatcaatgaccaccgccattcacaagaactttgactgtttgaagttgatcctgagactcttgaagtaatggctgatcctgcatcagcattgtatatatggtcttaagtgcctggcctccttatccttcagaatatttattttacttacaatcctcaagttttaattgattttaaatatttttcaatacaacagtttaggtttaagatgaccaatgacaatgaccacctttgcagaaagtaaactgattgaataaataaatctccgttttcttcaatttatttcagtgtaatgaaaaagttgcttagtatttatgaggaaattcttcttcctggcaggtagcttaaagagtggggtatatagagccacaacacatgtttattttgcttggctgcagttgaaaaatagaaattagtgcccttttgtgacctctcattccaagattgtcaattaaaaatgagtttaaaatgtttaacttgtgatcgagacctacatgcatgtcttgatattgtgtaactataatagagactctttaaggagaatcttaaaaaaaaaaaaacgtttctcactgtcttaaatagaatttttaaatagtatatattcagtggcattttggagaacaaagtgaatttacttcgacttcttaaatttttgtaaaagactataagtttagacatctttctcattcaaatttaaagatatctttctcctcttgatcaatctatcaatattgatagaagtcacactagtatataccatttaatacatttacactttcttatttaagaagatattgaatgcaaaataattgacatatagaactttacaaacatatgtccaaggactctaaattgagactcttccacatgtacaatctcatcatcctgaagcctataatgaagaaaaagatctagaaactgagttgtggagctgactctaatcaaatgtgatgattggaattagaccatttggcctttgaactttcataggaaaaatgacccaacatttcttagcatgagctacctcatctctagaagctgggatggacttactattcttgtttatattttagatactgaaaggtgctatgcttctgttattattccaagactggagataggcagggctaaaaaggtattattatttttcctttaatgatggtgctaaaattcttcctataaaattccttaaaaataaagatggtttaatcactaccattgtgaaaacataactgttagacttcccgtttctgaaagaaagagcatcgttccaatgcttgttcactgttcctctgtcatactgtatctggaatgctttgtaatacttgcatgcttcttagaccagaacatgtaggtccccttgtgtctcaatactttttttttcttaattgcatttgttggctctattttaatttttttcttttaaaataaacagctgggaccatcccaaaagacaagccatgcatacaactttggtcatgtatctctgcaaagcatcaaattaaatgcacgcttttgtcatgtcagtggtttttgttttgtgaaattcctttgaccatattagatctatttcatttccaatagtgaaaaggagatgtggtggtatactttgtttgccatttgtttaaaagatacaacggataccttctatcatgtatgtactggcttataaatgaaaatctatctacaacattacccacaaaggcaacatgacaccaattatcactgcctctgcccttaaaaatgtcagagtagtattattgataaaaagggcaagcaatagatttttcatgactgaataaactgtaataataaaacatatgtctcaaagtgtatcacatatgaatttagcctaattgttttcagtttcattctcaatatttagtttacaacatcattttcccctaaactggttatattttgacctgtatatcttaaatttgagtatttatatgcctaaatacatgtgtgagttttgtttgacttccaagtccaaactataagattatataagttcatatagatgaatcagaaatatgtggtaatactattaagtcacaaacactaacaatttccaactatagaaataacagttcttatttggattttgggaatgctaccaata

SEQ ID NO: 7321 - DNA, 1280 bp, Homo sapiens
ttttaatggtcagactctattacaccccacattctcttttcttttattcttgtctgttctgcctcactcccgagctctactgactcccaacagagcgcccaagaagaaaatggccataagtggagtccctgtgctaggatttttcatcatagctgtgctgatgagcgctcaggaatcatgggctatcaaagaagaacatgtgatcatccaggccgagttctatctgaatcctgaccaatcaggcgagtttatgtttgactttgatggtgatgagattttccatgtggatatggcaaagaaggagacggtctggcggcttgaagaatttggacgatttgccagctttgaggctcaaggtgcattggccaacatagctgtggacaaagccaacctggaaatcatgacaaagcgctccaactatactccgatcaccaatgtacctccagaggtaactgtgctcacgaacagccctgtggaactgagagagcccaacgtcctcatctgtttcatagacaagttcaccccaccagtggtcaatgtcacgtggcttcgaaatggaaaacctgtcaccacaggagtgtcagagacagtcttcctgcccagggaagaccaccttttccgcaagttccactatctccccttcctgccctcaactgaggacgtttacgactgcagggtggagcactggggcttggatgagcctcttctcaagcactgggagtttgatgctccaagccctctcccagagactacagagaatgtggtgtgtgccctgggcctgactgtgggtctggtgggcatcattattgggaccatcttcatcatcaagggagtgcgcaaaagcaatgcagcagaacgcagggggcctctgtaaggcacatggaggtgatgatgtttcttagagagaagatcactgaagaaacttctgctttaatgactttacaaagctggcaatattacaatccttgacctcagtgaaagcagtcatcttcagcgttttccagccctatagccaccccaagtgtggttatgcctcctcgattgctccgtactctaacatctagctggcttccctgtctattgccttttcctgtatctattttcctctatttcctatcattttattatcaccatgcaatgcctctggaataaaacatacaggagtctgtctctgctatggaatgccccatggggcatctcttgtgtacttattgtttaaggtttcctcaaactgtgatttttctgaacacaataaactattttgatgatcttgggtggaa

SEQ ID NO: 7322 - DNA, 831 bp, Homo sapiens
atgtctccagcagaacagctcaaacagatggctgcacagcagcaacaaagggccaaactcatgcagcagaaacagcaacagcaacagcagcagcagcagcagcagcagcaacagcactcaaatcagacttcaaattggtctcccttaggacctccctctagtccatatggagcagcttttactgcagaaaaaccaaatagcccaatgatgtacccccaagcctttaacaaccaaaaccctatagtgcctccaatggcaaacaacctgcagaagacaacaatgaataactacctccctcagaatcacatgaatatgatcaatcagcagccaaataacttgggtacaaactccttaaacaaacagcacaatattctgacttatggcaacactaaacccctgacccacttcaatgcagacctgagtcagaggatgacaccaccagtggccaaccccaacaaaaaccccttgatgccgtatatccagcagcagcaacagcagcagcaacagcaacagcagcagcagcagcagcagcagccgccacctccacagctccaggcccccagggcacacctgagcgaagaccagaaacgcctgcttctcatgaagcagaaaggagtgatgaatcagcccatggcttacgctgcacttccatcccacggtcaggtaagtgtgaaagtgacacactcttcgagcagttcttgtggtgcatttgactgtcgatgtgtgatgttctacaagtccactgtagtggggtctaattgcctgcagaaaacctctttacatcctcaggtagtggccaggtttggagtgttctttttccatttctcctaa

SEQ ID NO: 7323 - DNA, 761 bp, Homo sapiens; identical to SEQ ID NO: 6637

SEQ ID NO: 7324 - DNA, 1474 bp, Homo sapiens
aggtccgcgatggagccatctgcactgggaccttggtccttgttccctgaccttgcgccgagggaccaggaaggtcaggtgctcgccccgcgtcggtgcttcaggagggaatgtggccagaacgagaaagtggtgatcatgtgtgcgagcagtgacaccatccggagcatcatgctggtggcgcacaggcatggcatgaccagtggagactacgccttcttcaacattgagctcttcaacagctcttcctatggagatggctcatggaagagaggagacaaacacgactttgaagctaagcaagcatactcgtccctccagacagtcactctactgaggacagtgaaacctgagtttgagaagttttccatggaggtgaaaagttcagttgagaaacaagggctcaatatggaggattacgttaacatgtttgttgaaggattccacgatgccatcctcctctacgtcttggctctacatgaagtactcagagctggttacagcaaaaaggatggagggaaaattatacagcagacttggaacagaacatttgaaggtatcgccgggcaggtgtccatagatgccaacggagaccgatatggggatttctctgtgattgccatgactgatgtggaggcgggcacccaggaggttattggtgattattttggaaaagaaggtcgttttgaaatgcggccgaatgtcaaatatccttggggccctttaaaactgagaatagatgaaaaccgaattgtagagcatacaaacagctctccctgcaaatcatgtggcctagaagaatcggcagtgacaggaattgtcgtgggggctttactaggagctggcttgctaatggccttctactttttcaggaagaaatacagaataaccattgagaggcgaacccagcaagaagaaagtaaccttggaaaacatcgggaattacgggaagattccatcagatcccatttttcagtagcttaaaggaagccccccactttttttttttctgcctgagattctttaaggagatagacgggttgaaagacatcaatgaaacagaaggggcgttcttgaagaattcataattttaagcagttagtaatttcattttaaaatttctgtagaagctcaggaattatgattaatcaccatctgcctccaggcctttcatctcatgacaaacaaatataataatgatatcgtgtcactctgttaaatgttcatactgtttcaagcccatatgattagatttatgtttttaaaatctgttgtctccatatcttgatggcttttgggagcatttcacacaaggatataaaatgcggttttcttaaatgaaatgttttgtagctagaataaaatcatttttacaagtacagcattcttggaaagaatttaacacccaaaaaggggaaaatgtaatgaaaaatctcaaggttggaaatacagccttactctctctagagctgga

SEQ ID NO: 7325 - DNA, 1957 bp, Homo sapiens
ctctgccagccctgagctgggaagaagcagctacctcggaggcagggcgcgcaggcgggcggcgatgagagggggcgcagccgcagccccgcgctggggagcccaccgctaaccctgcaccccacccacccctgcacaaaagagctggcgggcgctggccacgtcgccctgggtgaccttcctcggatgcagaatccgcccctgcgagcatcctcttcctcctaggctctgaaggcccggggagcgtgagcgatgcccagctgcacccgggcagggctcgcctttgtttgccagtaaggaggagaggctgtctcagctgcagaggggtcatccctgcttcaagccagtgcctcttcccagctcccatggggaccaccgaagccacgctccggatggaaaacgtggacgtgaaggaggaatggcaggacgaagatcttcccagccaggaattgctttgcacaatcctgggaaccaccaagtccaaaatccacagggcaggctggaaactgtcaggccactcccagaagagacgggggtggaactgcttggcagcccggtggaagacacatcctctcctcccaacacgctaaatttcaacggagcgcatcgtaagaggaagacgctggtggccccagagatcaacatttctctggatcagagtgaggggtccctgctgtccgatgacttcttggatacccctgatgacctggatattaacgtggatgacatcgagacccccgatgagaccgactcgctggagttcctggggaatggcaacgaactggagtgggaagacgacacccccgtggccaccgccaagaacatgcccggggacagcgcggatctatttggggacggcacgacggaggacggcagcgccgccaacgggcgcctgtggcggacagtgatcatcggggagcaagagcaccgtatagacctgcacatgatccggccttacatgaaagtggtcacccacggagggtactacggcgaaggcctcaacgccatcatcgtcttcgcagcctgcttccttccagacagcagcctccccgactaccactacatcatggagaacctcttcctgtacgtcatcagcagcttagagctcctggtggctgaggactacatgatcgtgtacctgaacggtgccacgccccggcggaggatgcctggaatcggctggctgaagaagtgctaccagatgatcgaccggaggttgcggaaaaacctgaagtccttgatcatcgtccacccctcgtggttcattcggactgtgctggccatctctcgccctttcatcagcgtcaagttcatcaacaagatccagtacgtgcacagcttggaagacctggagcaactcatccctatggaacacgtccagatcccagactgcgtcctgcaatacgaagaggaaagactgaaggccaggagggagagcgcgaggccccagccggagtttgtgctgcccaggtctgaagagaagccagaggtggcaccagtggaaaacaggtctgctctggtctcagaagatcaggaaacaagcatgtcctgaggcgacgtgagcataacaaaggacatggaagaagattccagatgccagaaaacctctgtcagacgcccactggccccagatctcatcctgcctcatcctgagtcccaatcttccaagggtgccagcccctccgttcatctctgaaacccagcatccttttcagctgcttgaaaacattgtattttttttttttaacgatgcagtatttgtgcgttccagaaaagggcccagctctgagcccctcacccttccacactcacgaactctcagccgaggaaggcaagaagcgcagggggtggcccgcgtggcgtcggtggcctccgctcctgctcgcagcctctgtggtcagagctggatacaagattcaagacccttctcttgcttgtcacccgctccaggttggag

SEQ ID NO: 7326 - DNA, 568 bp, Homo sapiens
actgcctgtaaagccctcgcatgagaggccagcctgctagggaaatccaggaatctgcaacaaaaacgatgacagtctgaaatactctctggtgccaacctccaaattctcgtctgtcacttcagacccccactagttgacagagcagcagaatttcaactccagtagacttgaatatgcctctgggcaaagaagcagagctaacgaggaaagggatttaaagagtttttcttgggtgtttgtcaaacttttattccctgtctgtgtgcagaggggattcaacttcaatttttctgcagtggctctgggtccagccccttacttaaagttattcaatctcctgagcctaacagcaatgtagaaacggaactttttgcttttccaaaagatctggaaagcatgaagactgggctttttttcctatgtctcttgggaactgcagctgcaatcccgacaaatgcaagattattatctgatcattccaaaccaactgctgaaacggtagcacctgacaacactgcaatccccagtttaagggctgaagctgaagaaaatgaaaaagaaacag

SEQ ID NO: 7327 - DNA, 3318 bp, Homo sapiens
aagcaagagagggagggaaaaaaaagagcctagagcagaaaagagaggagtttggagccgagcgggagagcgggatttatcgtttggaatttttcaggagatcgttttgatacccctgggctctgggcagcggcggcaacagcagcctccacgctcggccgggtcagacgcggggcgaggcgggcgggcgggcggccgggcgccgaagacccggcgcgggcggcggcggctgctgctgccggggaccacgcgccgcgagcctcttccgccccagagatcagcgctcgcgccccctccctcaccccggcctctcccttctcccccatcccaccccgcccccaccccggccctctcccgcgcgcgccccgccacccgcgcgcactcgctcacgctgcccctcgcgcacacacatggtcggctcgcggcaaagtttcgcctgcgatcaccactccgggatcctgccgcagtgcttggggctgtaaccttgaactttcccagcgcggtgacacattctccccgctctccctcccgcccgcccgctcgccctcctgcgccctcccgcgcccccctccccgccttttttgaaaaagcattttaccaccaaccaccaccccaatccaacccacaccgaaccttcgcgcaccccctacaccccaacaacaacaacaactgcaaaatagaaaacaaatccccaaacccaggcgaaaagcagccaacaccggcggcggcggcggcctcggcaagcacggccagcgcgctcggactgcaagagggttaaaagtgtagattggatttcacccctggaaatctagcacgccgagtgaacttgaatctttggctatttaaggaggactgggtttgttgtgaagttgcggtgatccagcgcagagccccgtcctgattgatcgcatcgcggggctcagatgactgtaaaatgaatagatgaaattcttgcttctcgaagattttcttgggcatctcccggaaagtgcgttttaaggcgaagtcatgatgtattctcccatctgtctcactcaggatgaatttcacccattcatcgaggcacttcttccacatgtccgtgcaattgcctatacttggttcaacctgcaggctcgaaaacgcaagtactttaaaaagcatgagaagcgaatgtcaaaggatgaagaaagagcagtcaaagatgagcttctcagtgaaaagcctgaaatcaaacagaagtgggcatccaggctccttgccaaactgcgcaaagatattcgccaggagtatcgagaggactttgtgctcaccgtgactggcaagaagcacccgtgctgtgtcttatccaatcccgaccagaagggtaagattaggagaatcgactgcctgcgacaggcagacaaagtctggcgtctggatctagtcatggtgatcctgttcaaaggcatccccttggaaagtaccgatggagagcggctcatgaaatccccacattgcacaaacccagcactttgtgtccagccacatcatatcacagtatcagttaaggagcttgatttgtttttggcatactacgtgcaggagcaagattctggacaatcaggaagtccaagccacaatgatcctgccaagaatcctccaggttaccttgaggatagttttgtaaaatctggagtcttcaatgtatcagaacttgtaagagtatccagaacgcccataacccagggaactggagtcaacttcccaattggagaaatcccaagccaaccatactatcatgacatgaactcgggggtcaatcttcagaggtctctgtcttctccaccaagcagcaaaagacccaaaactatatccatagatgaaaatatggaaccaagtcctacaggagacttttacccctctccaagttcaccagctgctggaagtcgaacatggcacgaaagagatcaagatatgtcttctccgactactatgaagaagcctgaaaagccattgttcagctctgcatctccacaggattcttccccaagactgagcactttcccccagcaccaccatcccggaatacctggagttgcacacagtgtcatctcaactcgaactccacctccaccttcaccgttgccatttccaacacaagctatccttcctccagccccatcgagctacttttctcatccaacaatcagatatcctccccacctgaatcctcaggatactctgaagaactatgtaccttcttatgacccatccagtccacaaaccagccagcctaacggcagtggtcaagtagtagggaaagtgcctggccatttcactcctgtcttggcaccctctccccatcccagtgcagtgcgacctgtgaccctgagcatgacagatactaaacccatcactacatccactgaaggtgaggcagcttcacctacagcaaccacctacacagcctcaggcacatctcaagccaatcgatatgtgggactaagcccaagagacccatccttcctacatcagcaacagctgaggatttgtgactggaccatgaatcaaaacggcaggcatttataccccagtaccagtgaggatacattgggaattacttggcaaagtcctggtacctgggctagcttggttcctttccaagtgtcaaataggacacccatcttaccggccaatgtccaaaattacggtttgaacataattggagaacctttccttcaagcagaaacaagcaactgagggaaaaagaaacacaacaatagtttaagaaattttttttttaaataaaaaaaaaggaaaagaggaagactggacaaaacaacacaaaggcagaaaggaaagaaactgaagaaagaagataatagaccagcaattgcagcacttacaatcactaattcccttaaggttgaaactgtaatgacataaaaagggtcgatgatatttcactgatggtagatcgcagcccctgcaacgtagcctttgttacatgaagtccgctgggaaatagatgttctgtctctatgacaatatattttaactgactttctagatgccttaatatttgcatgataagctagttttattggtttagtattcttgttgtttacgcatggaatcactattcctggttatctcaccaacgaaggctaggaggcggcgtcagaggtgctgggtgacagagccatgagccagccattttataagcactctgatttctaaaagttaaaaaaaatatatgaaatctctgtagcctttagttatcagtacagatttattaaatttcggcccttaacccagccttttccagtgtgtaacccagtttgaaatcttaaaaaa

SEQ ID NO: 7328 - DNA, 998 bp, Homo sapiens
atcattcctagaactgaagttgaaaaggccatcaggatgtcccggagccgtatcaatgatgctttccgtctgaatgacaacagcctagagtttctggggatacagccaacacttggacctcctaaccagccccctgtttccatatggctgattgtttttggagttgtgatgggagtgatagtggttggcattgtcatcctgatcttcactgggatcagagatcggaagaagaaaaataaagcaagaagtggagaaaatccttatgcctccatcgatattagcaaaggagaaaataatccaggattccaaaacactgatgatgttcagacctccttttagaaaaatctatgtttttcctcttgaggtgattttgttgtatgtaaatgttaatttcatggtatagaaaatataagatgataaagatatcattaaatgtcaaaactatgactctgttcagaaaaaaaattgtccaaagacaacatggccaaggagagagcatcttcattgacattgctttcagtatttatttctgtctctggatttgacttctgttctgtttcttaataaggattttgtattagagtatattagggaaagtgtgtatttggtctcacaggctgttcagggataatctaaatgtaaatgtctgttgaatttctgaagttgaaaacaaggatatatcattggagcaagtgttggatcttgtatggaatatggatggatcacttgtagaggacattgctttttcacttccaaggtgcttgatcaacatctccctgacaacacaaaactagagccaggggcctccgtgaactcccagagcatgcctgatagaaactcatttctactgttctctaactgtggagtgaatggaaattccaactgtatgttcaccctctgaagtgggtacccagtctcttaaatcttttgtatttgctcacagtgtttgagcagtgctgagcacaaagcagacactcaataaatgctagatttacaca

SEQ ID NO: 7329 - DNA, 804 bp, Homo sapiens
gcagacgaggcagggggaggtttgcactcggcgtggcgcgggtgagccgcgtgctctcgggcacccggccgccagttcggatgcttccgatcctcggggagccggggcgctgcgccggagtcacttcagcccatgttgttcaggtgacacccggggaagagcagactccagtgtgcaaaacgtttcggggtttccgggccagcggttccgggcgcgcctcgcgggcggcggcgcagaactacaacccccaggctccctggcgtggcggcacgtgggcccgagccgggcggccgcggatataaagcgcggcggcggctgccgggcggagcggctgcacggacaagagcggaggcctggaaggggaaactgaagcagaaagaggttacttaatgggctcaaggtcacctacctgacctaccagcagctcaatggccttcccaaagaagaaacttcagggtcttgtggctgcaaccatcacgccaatgactgagaatggttttaagaaagactggcatcagctgtttctcaatgcatcagtcacttgttcgcagatcaaacagaagacatgtgattgcatgaatcggcaggatttacttcctgttacagaagaaatcaacttttcagtaattggtcagtatgtggattatcttgtgaaagaacagggagtgaagaacatttttgtgaatggcacaacaggagaaggcctgtccctgagcgtctcagagcgtcgccaggttgcagaggagtgggtgacaaaagggaaggacaagctggatcaggtgataattcacgtaggagcactga

SEQ ID NO: 7330 - DNA, 864 bp, Homo sapiens
gggaggcgcgatcggtccggtcggtggctccccgcggcggggccgggcccgatctcgggcgggaaccgagcgcagagccggtagcgggaaggatgaccacgctcacacgacaagacctcaactttggccaagtggtggccgatgtgctctgcgagttcctggaggtggctgtgcatctcatcctctacgtgcgcgaggtctaccccgtgggcatcttccagaaacgcaagaagtacaacgtgccggtccagatgtcctgccacccggagctgaatcagtatatccaggacacgctgcactgcgtcaagccactcctggagaagaatgatgtggagaaagtggtggtggtgattttggataaagagcaccgcccagtggagaaattcgtctttgagatcacccagcctccactgctgtccatcaggtgggctgcccctgcccctcgcccactagctggcatcagctcagactcgctgttgtctcatgtggagcagctgctccgggccttcatcctgaagatcagcgtgtgcgatgccgtcctggaccacaaccccccaggctgtaccttcacagtcctggtgcacacgagagaagccgccactcgcaacatggagaagatccaggtcatcaaggatttcccctggatcctggcggatgagcaggatgtccacatgcatgacccccggctgataccactaaaaaccatgacgtcggacattttaaagatgcagctttacgtggaagagcgcgctcataaaggcagctgagggggcacctgccaccccactgatgcccaaactgtcagactttgggggatccccgcctagggcagtgctgcatggctgccctgattccaagtgctct

SEQ ID NO: 7331 - DNA, 7704 bp, Homo sapiens
attggattagcggcagcagcctgccagcctgcccgaggagtgctgggaccagcgcgctgcacgccgactggcacgatggcctcgtctcaggggaaaaacgagctgaaattagccgactggatggcaactctgccggagagcatgcacagcatccccctcaccaatttagccattccagggtctcatgattccttcagcttctacattgatgaagcctctccagtaggtcctgagcagccagaaactgtccagaattttgtctctgtgtttggaactgtggccaaaaagctcatgcggaaatggttagccactcagacaatgaattttactggccagctaggagctggaattcgttattttgatcttcgaatttccaccaagcccagagaccccgacaatgaactctattttgctcatggtttgttcagtgccaaagtcaatgaaggccttgaggagatcaatgcattcctcacagatcaccataaggaggtagtgttcttggacttcaaccacttttatgggatgcagaaatatcaccatgaaaaactggtccaaatgctgaaagacatctatggaaataaaatgtgcccagcgatttttgcccaggaagttagtttaaagtacctgtgggagaaggactatcaagtgctggtcttctaccatagtccagtggctctggaagtgccctttctctggcctgggcagatgatgccagcaccctgggccaacaccacagaccccgagaaactgatccagtttcttcaagcatccatcactgagagaagaaagaagggatcgttttttatatctcaggtggtgctgacccccaaagctagcactgtggtcaaaggggtggcaagtggcctcagagaaacaatcacagaaagagctcttcctgccatgatgcagtgggtccgcacgcagaagccaggagagagtggcatcaatattgtcactgccgattttgtagaacttggtgactttatcagcactgtcataaagctcaactatgtctttgatgaaggagaagccaacacttgatagcactacttggagtttccatgaataagatggagaaagctcattgtattagggcatactatctgtaaacactctgatcttcctattccactgagtctctgaagggaatagggctggtagtgggtgggaaaaggggaaaaactgtttcttcagtgattacaatcatactcttcattactataaatatttcatttcccatttgatgagcaaaatctacttctagtgttaggaataaaaaaaaaagaccagtaactttgtttttcaaaattagtctttgtaacatagaattcatgagtgtttacttgattaggttctctatttccagcctatgactcctacgctgtctataccctgcaacctttctgctccctctcttgctcgctctttttaatcagatgctgtatgggaatcaaaacaattgaatgcccaacattttgtgtattacattgttgtcttaaaacttactagttttgtgggacttgttataatgctctatagtcatccacagttgggcaatcatagctaatttttggtcatagaaaatctgcatcaaatcagtttccatgcatcagtaatattgaaggtcataatcagtgatttttgttatatgaaaataatagtgtttcacagtatttctatttaaggcagctataaatataggagaaaaatgtttttggagagctgtgaatgccaatttcagagggaaaaatggttgaggggtgaaagagatgtatggcattttaatttggcaatctcttaaataatattgccctgcaagtacccagtaaatggtaaggtacaagtgtgttaaaattgaaaactctgaaaataactctttaaaaagccctcttaatgatgctcttgatgaaagaaaaagacagaaggaaggaaggaaggaaggaaggaaggaaggaaggaaggaaggaaggaaaggaagaaaggaagggagggaggaagggagggaagaagggagggaaggacagaaggaaggacgggaggaaggaaggaagggaggaaggaaggaaggaagagagggagggagggaggaagagagggagggagggaggaagagaggaaggaagaagaaaaagactgcaagctttcctgccaatttgggattttcaaatatttaattctaaattccagattttaaggaagatttttcaagaaactgcaagtttttgacttgaaggaaagaaagaggaaggctggtagaagcagttagagcaatgtgtttgaaattatgtccatgaaatcacagggatctctgaaatatctttaggaaacttgaaatttatgaggtctgaatggacttgtttaaaattggctctgactcctcacttctgagtttcatcctatccgagggatgagattaaggcagaggcaaaagtttcacacaaagtttctgcaacctaacgtttaatagtccgggtctacagggaagaacaatgacacagcttgagcgttacttcctccttcgtgtcattgtgatatttgacaactctaaaaaataaaaaaaaaaaacttagagcacaataatccttgcctatgtacttcacaggaatattgtgaggtgtttataaaattataaaatttgatgaaattcttacaattattaattattttattttcatgtttagaaataatcacaccccaatagtttcctaggataatacagtccatgcaaagtagggtcatagagaaataaaagcatgccctcagcttttaatgaacttaaatgtagcacatatggcttaatctcttagacttagataagggagttcaattcaaaaccatatatgtcaagaccacaaataatcaagagttgatttcaagattataaatactcatgatcagaaaatagtacttattagcaattaaagggaggaaaagaaattgtttatactgaagagaatgtttatgaggagtgtgtatgtacctgtggtataccaaatagcatacatgtacacacaaaaatgtgtgtatacatttgggttgtgtgtatacatcttgccatatacaatatacaaacatatgcccattcctgtgatagcatacaaattcaaacatacagaaacacacacagatatggacacagtacaattcttcttttcaaatgaagacattgataatattaaataatttaattttaagactgaaacccttaatattgtgtgaaaaagagtaataaaacctttgaaagtagagtagatgatcacatcaaagtatttttgtaaaagaattctagtgtaggacttaattatttttaaaatatatttcttctcttctttccattttcccttcccttgtagttttattatctttctgtcttttacacctgctctttatgtgaaaatgtatatgaatccttttaaaatgattaggattattgaaatgtatgtcccgtaaatttggtttttgggcagactttctctctaactggctattcattcatccttcaggaggatcttagccaagaatatttgcaatgacacatgaatttaattttataaatataatggaaaacagatttttcatcatatcatgaataaaatatagaggtaactatgttgtattttcttgaacctagatactttctcatagtgtttgcttagaattaactttgtcctatttgtcaactgggttctggaaaaaaacaaacatgatgaagcttttgaataattgtgcagttttttaactagggaaagctttgtactgctgctaatgatatgcacccagaaaccttgttagacaaaaggcagtttcaagccaatgctatggtttccatgtggacatacagtgcctatgtagcaggcacttagagtaaatggacttgccttaatttataaaggagggaagaggtagaagggaaccatgggtcctccagctagagggggagtttactaaaagggagtccttggaaaggggaatggagagaaggtgcctttgactgtcttctatccattagttctgccctggagcacactggggaagcaggctgcgggccttccaaaagtaaaaaatggtgatatgcaatcgaagcttatccttagcctatgcacatttgtctcagctgggcattgtcttttcagagagcttgtagcacaagggctacacatgggcgccaagatggtggtagatacaccttggtgcactttttgttttacttgtttcttaagactatttcacaagtcctgtgaggcaaaaaaacaaaacaaaacaaaacaaccaaacaaatacaatctaacttttacccaatctacagcaggaaatcaaaggagtgggtggaatgagagaaaatatgcaaagagatcatttttaagtttgatttcctgtctgtaattttcaaggactaatatagcaaatttttcttctgccattatcatttatgtctccctatttaccacacaataatgtaaatgcagagaatgaggaggcatcttttaaaagccttaggatattctatatgatgacctcaatattgactttcagccatactgggaaaacttacttttcatggagtgccacctaacagtgaatgtattagagtataaaatgtttgccatgtatacacctgtatgtgcacatacacacattacacacacacacagaatgcacatttcacacacatatacttattattcaagttgaaactgcactctaatcaatctgagtctattgctgtttcaactcttaaaatcaatatctcctacattagtagatataaacataattcaaatatttaaatatttaagaggagaaaagtaactagaaaaccaatgaaaagtgaggccatcagaaatagaaaatgcctggcacgaacagtctatctaaattctcaatttcacttcaaattagagaatccataatggactagaatataaattacaaacacatacacacatcttcacttaaagttgttttaagttctttgaagttctgacatgtttttagccagggttatttgttcaggttcttccttgttaggattccagactggaaagttggaagtctcaggaaatgcatgtttccatgagttttttagtttcacagttttacagatccaacgacacaatcttttaatctttggtcactcaaccaaacaggagttccgtaggcagagtgctcactttgaattgctaatagaaaataatgcacagtgtcctcaggatatgctaaacaaggtttttaagagcattttattttacagcactttagtcttttcagctagatttcagtgacactatggtgtaaatgctatatctgccataacttattggtggctcctgtgttacatacagttttaaataatgctctaaattgtttgttttcccaatgataatgataaagtgttctgtagaatttgtaaaacatgtcaattgaatctgttgaaaattgtgtaattgttatttcaattgtgatactattttgtaggtaatagttttaaacgtatatttgtatgagtcaaaagtatgtgcttgtatgtggtatgtgtgtgtaagtatataatatcttatcaaaaatcaaacttatcctaaagaaaaagggcacattgtgaccagccttaatttattaacacttttttgttgtttttgcaatttggatttaaaattgaaacagaaattaagtttttgttaaaaatggtgtcttttaattttgtgaggaatgggctttagaacctatctgagttcccacaagcaaactgtccaccttgtgaggtaccccattgcttttcgtaataatcaaacatcaattcatatattaacttcattttcatacagactaatttgttttcatcaacaatagaaccagtacacctttaaagttgaccttcccaacatggcacccatttttctttaatgataaattttccatgaaaaattgtttctccaaaccattactttttaaaattcaatcttcccaagtaagatgaactgccttggtgttaggagagcttttaaaggcccatccatactaggtggttccaacatggttctcttctcgagaaaacaagcatgcaacccacacacttttctggtctgccccacgtgtagaattagtctagcaatagaaaactcatgactgacaaggatctacacatgtggtcatgcttgaagcaaaaattctgtgaccttctttgggcttggatctgattacagaatattaattaactttcttatttcctttctttctccatccttagttattccttttcaatatttagagttgccaggtaaaatacaggatatccagtgaaatttaaatttcagataaacagtatttctttagcatatttctcatatatttaatcagacatactttcactttaaaaaaagtttatctgaaattcaaatgtaactgggtatgtcctatatattttttcctaaatctcacaattctatccacactgcctttctatctttttcagctgggctatctataaggggcgagatctacctccctccatacccttgtgttcagacaccttatgaatatctgcagtcataatgtccttcaagaaagaaaacattggtcagctctaggtcctgcaaatgctttttgaaggacgaactcaaatacagatgggataatcaagtaaatatcttcataggatcaatgccaccatgttcaacacttccctttgccagcctgttgtgaggtccaagtttccccattaatcccttatatagcatttcccagtaactgggacaaccaaaaacacaccgacatattagaaatgctcctgaaaagtggcaacaccgcctaactcagtaccaggacctcttttaaattcaatttcttttttctttcagagagataacaaacgaattcattatttcccccattcacatcttaccacaaattatttttatcaggttaaaactggtcatctacggaattgtagaaaggtgacataggaactgtcttcactgctggaagaataaaagagtctgaggtatagacactgccctggtgacaccttctcagaacattgttgggggacaggggaggcaggcgcaagtaggggatagaatctgaccctgacatgcagctatcacctggcagagagactcgtcaaagcaaattataacgaccagtactatttttttttggaattgaaaacccaagaagccctaaaataagaacagtgagatcaaaggctggtttctaaaacaatgcagaaaatagaaccatgttggaattcctaaattctagctttcaaatactactgtttccaacagtgaatccttgacagagactgaatgcagatggaattttgaaacattttcagtagctacctcctctcctgaaattcctataagtggcagaggaaaatccaaatcctttaatataacatgtccatctcatgactcctgcttacacacatttgtgttgatttgcttcatttctggaggatgggaatttgcagagctggtgacatttccttcattagacaccagaaattcaccagagagagacagatctgtgccttctctttttaggatctggttattgatactttaataaatgtggtgtaaagaaaatccatggctacagtctgtatagaaaatgtgaattttttaaataagattgtgttcttaatgtaaaaaataaaagtttatttgtattcagtgaaatgcctaataaagtcctggtaccaat

SEQ ID NO: 7332 - DNA, 1414 bp, Homo sapiens
taagtcctcaagctggcaggtggtcgggggagcggccggagaggagctgccgggagttcgtgccctgcaggacatgacaccagtggcatatcacggccatggggtctcagcattccgctgctgctcgcccctcctcctgcaggcgaaagcaagaagatgacagggacggtttgctggctgaacgagagcaggaagaagccattgctcagttcccatatgtggaattcaccgggagagatagcatcacctgtctcacgtgccaggggacaggctacattccaacagagcaagtaaatgagttggtggctttgatcccacacagtgatcagagattgcgccctcagcgaactaagcaatatgtcctcctgtccatcctgctttgtctcctggcatctggtttggtggttttcttcctgtttccgcattcagtccttgtggatgatgacggcatcaaagtggtgaaagtcacatttaataagcaagactcccttgtaattctcaccatcatggccaccctgaaaatcaggaactccaacttctacacggtggcagtgaccagcctgtccagccagattcagtacatgaacacagtggtgaattttaccgggaaggccgagatgggaggaccgttttcctatgtgtacttcttctgcacggtacctgagatcctggtgcacaacatagtgatcttcatgcgaacttcagtgaagatttcatacattggcctcatgacccagagctccttggagacacatcactatgtggattgtggaggaaattccacagctatttaacaactgctattggttcttccacacagcgcctgtagaagagagcacagcatatgttcccaaggcctgagttctggacctacccccacgtggtgtaagcagaggaggaattggttcacttaactcccagcaaacatcctcctgccacttaggaggaaacacctccctatggtaccatttatgtttctcagaaccagcagaatcagtgcctagcctgtgcccagcaaatagttggcactcaataaagatttgcagaatttaatacagatcttttcagctgttcttagggcattataaatggaaatcataacgtggttctaggttatcaaaccatggagtgatgtggagctaggattgtgagtgacctgcaggccattatcagtgcctcatctgtgcagaagtggcagcagagagggaccatccaaatacctaagagaaaacagacctagtcaggatatgaatttgtttcagctgttcccaaaggcctgggagctttttgaaaagaaagaaaaaagtgtgttggctttttttttttttagaaagttagaattgtttttaccaagagtctatgtggggcttgattcacccttcatccattggctggaacatggattggggatttg

SEQ ID NO: 7333 - DNA, 979 bp, Homo sapiens
ttaaactctggggcaggtcctcgcgtagaacgcggctgtcagatctgccacttcccctgccgagcggcggtgagaagtgtgggaaccggcgctgccaggctcacctgcctccccgccctccgctcccagatggctgccagcaacaggaaggagggggagagaataccaactccatcagttccaacggagaagattcagatgaggctcaaatgcgacttcagctgaagcggaagctgcaaagaaatagaacatcctttacccaagagcaaattgaggccctggagaaagagtttgagagaacccattatccagatgtgtttgcccgagaaagactagcagccaaaatagatctacctgaagcaagaatacaggtatggttttctaatcgaagggccaaatggagaagagaagaaaaactgaggaatcagagaagacaggccagcaacacacctagtcatattcctatcagcagtagtttcagcaccagtgtctaccaaccaattccacaacccaccacaccggtttcctccttcacatctggctccatgttgggccgaacagacacagccctcacaaacacctacagcgctctgccgcctatgcccagcttcaccatggcaaataacctgcctatgcaacccccagtccccagccagacctcctcatactcctgcatgctgcccaccagcccttcggtgaatgggcggagttatgatacctacacccccccacatatgcagacacacatgaacagtcagccaatgggcacctcgggcaccacttcaacaggactcatttcccctggtgtgtcagttccagttcaagttcccggaagtgaacctgatatgtctcaatactggccaagattacagtaaaaaaaaaaaaaaaaaaaaaaaggaaaggaaatattgtgttaattcagtcagtgactatggggacacaacagttgagctttcaggaaagaaagaaaaatggctgt

SEQ ID NO: 7334 - DNA, 1347 bp, Homo sapiens
ggccgccctcccgctgagaaactgtcaccaaatccccccaaactgacaaagcagatgaacgctatcatcgatactgtgataaactacaaagataggaaaggattcgtaatcataagtaccggagcctaggcgacctggagaaggatgtcatgcttctctgtcacaacgctcagacgttcaacctggagggatcccagatctatgaagactccatcgtcttacagtcagtgtttaagagtgcccggcagaaaattgccaaagaggaagagagtgaggatgaaagcaatgaagaggaggaagaggaagatgaagaagagtcagagtccgaggcaaaatcagtcaaggtgaaaattaagctcaataaaaaagatgacaaaggccgggacaaagggaaaggcaagaaaaggccaaatcgaggaaaagccaaacctgtagtgagcgattttgacagcgatgaggagcaggatgaacgtgaacagtcagaaggaagtgggacggatgatgagtgatcagtatggacctttttccttggtagaactgaattccttcctcccctgtctcatttctacccagtgagttcatttgtcatataggcactgggttgtttctatatcatcatcgtctataaactagctttaggatagtgccagacaaacatatgatatcatggtgtaaaaaacacacacatacacaaatatttgtaacatattgtgaccaaatgggcctcaaagattcagattgaaacaaacaaaaagcttttgatggaaaatatgtgggtggatagtatatttctatgggtgggtctaatttggtaacggtttgattgtgcctggttttatcacctgttcagatgagaagatttttgtcttttgtagcactgataaccaggagaagccattaaaagccactggttattttatttttcatcaggcaattttcgaggtttttatttgttcggtattgtttttttacactgtggtacatataagcaactttaataggtgataaatgtacagtagttagatttcacctgcatatacatttttccattttatgctctatgatctgaacaaaagctttttgaattgtataagatttatgtctactgtaaacattgcttaatttttttgctcttgatttaaaaaaaagttttgttgaaagcgctattgaatattgcaatctatatagtgtattggatggcttcttttgtcaccctgatctcctatgttaccaatgtgtatcgtctccttctccctaaagtgtacttaatctttgctttctttgcacaatgtctttggttgcaagtcataagcctgaggcaaataaaattccagtaatttcgaagaa

SEQ ID NO: 7335 - DNA, 8178 bp, Homo sapiens
ggagcaggagcctcgctggctgcttcgctcgcgctctacgcgctcagtccccggcggtagcaggagcctggacccaggcgccgccggcgggcgtgaggcgccggagcccggcctcgaggtgcataccggacccccattcgcatctaacaaggaatctgcgccccagagagtcccgggagcgccgccggtcggtgcccggcgcgccgggccatgcagcgacggccgccgcggagctccgagcagcggtagcgcccccctgtaaagcggttcgctatgccggggccactgtgaaccctgccgcctgccggaacactcttcgctccggaccagctcagcctctgataagctggactcggcacgcccgcaacaagcaccgaggagttaagagagccgcaagcgcagggaaggcctccccgcacgggtgggggaaagcggccggtgcagcgcggggacaggcactcgggctggcactggctgctagggatgtcgtcctggataaggtggcatggacccgccatggcgcggctctggggcttctgctggctggttgtgggcttctggagggccgctttcgcctgtcccacgtcctgcaaatgcagtgcctctcggatctggtgcagcgacccttctcctggcatcgtggcatttccgagattggagcctaacagtgtagatcctgagaacatcaccgaaattttcatcgcaaaccagaaaaggttagaaatcatcaacgaagatgatgttgaagcttatgtgggactgagaaatctgacaattgtggattctggattaaaatttgtggctcataaagcatttctgaaaaacagcaacctgcagcacatcaattttacccgaaacaaactgacgagtttgtctaggaaacatttccgtcaccttgacttgtctgaactgatcctggtgggcaatccatttacatgctcctgtgacattatgtggatcaagactctccaagaggctaaatccagtccagacactcaggatttgtactgcctgaatgaaagcagcaagaatattcccctggcaaacctgcagatacccaattgtggtttgccatctgcaaatctggccgcacctaacctcactgtggaggaaggaaagtctatcacattatcctgtagtgtggcaggtgatccggttcctaatatgtattgggatgttggtaacctggtttccaaacatatgaatgaaacaagccacacacagggctccttaaggataactaacatttcatccgatgacagtgggaagcagatctcttgtgtggcggaaaatcttgtaggagaagatcaagattctgtcaacctcactgtgcattttgcaccaactatcacatttctcgaatctccaacctcagaccaccactggtgcattccattcactgtgaaaggcaaccccaaaccagcgcttcagtggttctataacggggcaatattgaatgagtccaaatacatctgtactaaaatacatgttaccaatcacacggagtaccacggctgcctccagctggataatcccactcacatgaacaatggggactacactctaatagccaagaatgagtatgggaaggatgagaaacagatttctgctcacttcatgggctggcctggaattgacgatggtgcaaacccaaattatcctgatgtaatttatgaagattatggaactgcagcgaatgacatcggggacaccacgaacagaagtaatgaaatcccttccacagacgtcactgataaaaccggtcgggaacatctctcggtctatgctgtggtggtgattgcgtctgtggtgggattttgccttttggtaatgctgtttctgcttaagttggcaagacactccaagtttggcatgaaaggcccagcctccgttatcagcaatgatgatgactctgccagcccactccatcacatctccaatgggagtaacactccatcttcttcggaaggtggcccagatgctgtcattattggaatgaccaagatccctgtcattgaaaatccccagtactttggcatcaccaacagtcagctcaagccagacacatggcccagaggttcccccaagaccgcctgataataatttggtatttggaggctcctgtgtcactgcaggaactaaaggaggctaaatccatgcctgatggaggagaagagttctatggttatctgcaaattctggccagacaacatcttgacgtcactccttagcttccataacctagccaagcaagaagttgcctttccaagacaaagcagtgtgctctaatgactaacccctcaaagtactatgccactttaactatagacccatctcctcgatcaatcaggatggcaagatggagctgaggagctcagcaacatcaagtctggagttggtctttaactcaactagctcgtttagacgtgtctgaacaccacatcacctgacagcacggggtggtttcccagtaaaatttacaaactcagctcaagggcagctgtgttgctttcctttccttgactgctgagaaactttttgacagggaacaatggaaacacaccttctgagctgaaacaaacaaacagaaacaaaacatactaaccagcaaaatccccaaatcatcaatcttgggttctcttgaagggcaggagtgtgttttatcttctcccgtcggagcaaacactatagatgtcctccctaaaattctgtcttccctagagcagccttgtaaattagctagggtcctagggttgaggcctaaatcaacttaaaattgtctctaaatatgtacctggatgtgtttgtacttgcagagcatgccctcttcatgtgcctagggctagtaactccctgtggcagaggcatgtaaagtattctgactttttttttttcaacttaattccatttccaatgaaatggatttttaaaaattttctccagagtgtgccatacttctccagctattatagttaatgtgtgtgtatccttgtgtatatgtgtgtttgtgtgtgcatatgtgttttcctagtggttacatgcttactaggcaattatgtaaataagcacagattcataggccagctaggcctgaggaaagaagacattataaagggagggagtattttaacattagctaaagctatcacacaaggcacccattctgctcccctcaacagccacagcccacttcgtccttgtcttaccaataaggggaaaggctggaggtgatatttttcacagaaccgcagaggttttgaacatatttgcaacattactttgagtacacatgagcaaaaattctgaattacatccaggaccccagaagctcattagatcaaagagtgcggggcccctcagagttaccagagattatctgcagacttcagtgcaatcgaatgaccatggtccattttgatggtcagaggtaggactgaaaaacgggtagaaacaattgctttagcgcttccttctgtactttgcctattaatgttttgtctttcaaaaatatattttctcctaattgtttaattggccaaataatggctgctttgggagttgtttgtatgccttggaaggccatggcctgcactttaaaaataagctaagtccattctgcccagcacgagcattaggacagagaatgcacttattttaggatccttaaaaattgcttcttttatggcacactgggttgacgactcatctcgtgggagccttcatggcacattgctgctgttctgcaggtcccaatacaattccttccccctctcagtgccacggcccccccattgctagctacaacaatttgatatcatattcccttttcaactccaaaggagatgataagaagctatcaaataatgctttaaaaaagcaacttgagtttcttaaaagaaaggaaatgaatacatgctgcataattacatttaaaatgtaagccatgttattataagccgcactgagatgaagatttgttagcaaaccagtttcaagcacactcacagtgaagtaaaatcatgtttttagcatctgaccattgggtaatattattctttgttatcaaaagagaaatatcacccaagtatagtatacttagacctcctagaggaaacactccagtcctaagcttggtgtctgaaaagaaaaacaaaaataaagattatggatttaggtcagggagacagagtgatattctgaagactgtgtttactccctcatcatcggccaaccaagatggagttctgcatcctgcacatatcagacatttcagtccaatttcaccaaagcatcagtgatgttctagaagcatcccagcagatggaggatcctaatgtatttgttctgggtatttcccaaggcccagcctgactggagtgtgtgtaccaacaggatgaatccaatcaagctacgcccccattttggtttcggattggccactcttgcatgtgctagtagattgtggaccaggaccagctgagcaaacacagttgcagagtagcctcctatgttgctaagaagctcctgctacccaggtgctttgaacaattgagtgctccctctggttaagtagagatggcaccaccggagtttttcttggatgtgaggctcaatcctttacggcagctattataacaaagtgaaggttttctccctgggaaatgcagcttttctctgtctttactaattctgccagcctgtgagagtaaccaccgtagctgggcttcttctcagattaattgtcatgccaggtctccttcctggggagctgtgatgctgctctgaggttgattgctgaggttgtagtgggtttttgtttgtttttgtttagtttttcttgattgttcttctttctcttgaatggcaagagaagaaacactttctctaacccacggccaggaaggaaatggggagagagctacttcttagttcaacctggttgccacataaaggaatctctctccttggactcagcccctaactggaagcaagagccactgccctctgagactgagagagcagcccgaggaggagatgaatccattctgccctttgtttgggtttgcttcctgtcagtgagagaatgctgaggcagttcctgttatgtgaaactttcatttttaaaaccaggacagtcctaaacagactggaatgagttggtcaatcccagttggtataggcccaatgatttttgctagtaagataggattgtcttcctcacccaaaatgccttcaagtgccctaaaatgggtattttaaaataagaataaataatgtagatttagtagaaaacctggaaaacataagaaacaaagatgaaacgaaaagtcccatgtaattccaccagttagagttaaccactgatatcgtttggatatatggctttctagtcttgtggatatccttttaatctcttgtaatataaagtctgaccatatgtgtccttgcatttgtttgtactggactctgttaatatttctatagtaatggctcactttggggagattgtgctgcacagtgtgtaggaagcacattgggtgtattattcccagttttgtattttgtatttccttggagatgtgcaggggttaagagcgggggtctggccatagctggccacgtcagactctcatatggtaagtatcacagagcacatgaggcctgtgttatgcgctggaaagactcaggaaatgagaggctctcttgttctgacaaggcaggctgagagctctcatttagggtcatcactccagataactccaaatgcagtttattgctcaactgaagcagatgatcactttttgcctccaagttcttcaccctagctagctcctttcaaagagccgagtatgctggatcttaaagggccaaactagttacatctcatacatttcctgatgtttagggatgccttcacttccatcaaggataccttggctgtgcaaggacctctgatagctggagtctccttttggtcactcccagctttgcttaaacttgatggagtttgctgtccagtgatccccggatctttcatcatgaaagccttccttcctctcctgatgtctcaggcctctagacctagactggggttctggcaaggaggcctctatcaatagtatgacatccaataatatgttagtgttgatattttgcacagtaatattaagtttaagagattataaaaatgagttcaaatgaataagttcctgtgatgtaagagattagatatgtgtgatttcagaaccaaaggcaggggggaatcccagaaagaaaacaataatataatcctagtttctatatattatttttattcattactgtatatgggtagagatcaatattctttcttatgctgttactattaattaacacattttttaaccatgccattgaacttttgggtgcattaaagtggaacccaagctcctcattagataataatggcatttggactgagtgccatattcctaaatttccaataaagtggttgatatagagaggacaggataaagccctatagtgtgcagttatatcaaaacagctagtctccactttagggaatgcctttactagagattacatgaaatgtctgcttataaaataagcagagatggcaccactaagcagccacctgaattgttttcctacaggaatgattacttttcagatccatttatgttttcatgctcaatacttactccccttccctgcaacacccaaagagtttacttttgcaagtcatttggtcttcagtctactactgaggaatagagaggcactaactgctttacccaggatcagaactcatgttcttaccttctattaatagagtacttgagccagatggactaactggtctcacattttctctatcttggttttacttccataaacatcaatatctttacccacatgatttttccatcctcccatttttttccatatgtattagggttcaggaactatgatgctaatgatcacatttcttcctagttcctaatttcattagtgccatttcctgatatctacagaaacaattatcaatacatgtagctgcttgagccttatttagaaggctagcctttcttttccaagtgctgtcagaatgtatacatttagtctgtctttttcccttttaggagtctttgttctgggttgatggcaaaattcctctttttacatgtgagatttttgatttcactgaattctacctagatttttatggacattggattttaaagaggaaaacactcattttcttagtaagatattggtgatacatagctatgccattgatttccatactcctgagctttggggagggagacagtggccaagtagcaggcagaataagatcatcactcatgtcctgaatcaatcacactttccttctcggattgtgtatatgctctgccacttcctacatattacatcctgagtttttaagtaaagtggatcttagccagatttgagtctaatggctgattcatcggcatagttcttggcgttaacatctcagtgtcctctttagttctctttgaggattcatgtcattgagggcctttgtgcctccacttgtctcagtatgaggaagaactttggtgtgagggcggagctatgtgaagggttgctgggttgggggattagttcatatggtccccatgccatctatttacttttggagagaggggactttgagtgggtgggtatggatagatgttcctcaaggaaaccctgctggctaatgggcactacatctgtgtattactgtgattctctctgtaagctccccatgtggccaaggacccccctcctaccagggcacttcctgccacctcattgcactggtctcaaccattcagcctgctgctgctgcaccatgttgggctgcggtaggatagggaaggggttctgttgattgctaaatgttgcctaactttatttccctctcccacatttcatgcaagggagcggacctaacacatgacttgcattctcttcctatgttcagaaactccagggcttgcccacgtgtatgtatgagtgaccaatggagcttggaattctttatctatatgatctgtccgaaaatgagatcttttgtactggaatttgtgatgtagttgatcattcagagccaaacgcatataccaataaagacaagactgtcatata

SEQ ID NO: 7336 - DNA, 2221 bp, Homo sapiens
cgggagccgcagccgcagcgaggccggcgggcgggagcgcacggaggtggggtcggccaggccggtgcgggctccttgcggcaggtcccaagagggttcggtccgagcccggtgggaggctcccggagcgcagcctgggcccagcccaccccgcgccggcggccatggcaggcaccctggacctggacaagggctgcacggtggaggagctgctccgcgggtgcatcgaagccttcgatgactccgggaaggtgcgggacccgcagctggtgcgcatgttcctcatgatgcacccctggtacatcccctcctctcagctggcggccaagctgctccacatctaccaacaatcccggaaggacaactccaattccctgcaggtgaaaacgtgccacctggtcaggtactggatctccgccttcccagcggagtttgacttgaacccggagttggctgagcagatcaaggagctgaaggctctgctagaccaagaagggaaccgacggcacagcagcctaatcgacatagacagcgtccctacctacaagtggaagcggcaggtgactcagcggaaccctgtgggacagaaaaagcgcaagatgtccctgttgtttgaccacctggagcccatggagctggcggagcatctcacctacttggagtatcgctccttctgcaagatcctgtttcaggactatcacagtttcgtgactcatggctgcactgtggacaaccccgtcctggagcggttcatctccctcttcaacagcgtctcacagtgggtgcagctcatgatcctcagcaaacccacagccccgcagcgggccctggtcatcacacactttgtccacgtggcggagaagctgctacagctgcagaacttcaacacgctgatggcagtggtcgggggcctgagccacagctccatctcccgcctcaaggagacccacagccacgttagccctgagaccatcaagctctgggagggtctcacggaactagtgacggcgacaggcaactatggcaactaccggcgtcggctggcagcctgtgtgggcttccgcttcccgatcctgggtgtgcacctcaaggacctggtggccctgcagctggcactgcctgactggctggacccagcccggacccggctcaacggggccaagatgaagcagctctttagcatcctggaggagctggccatggtgaccagcctgcggccaccagtacaggccaaccccgacctgctgagcctgctcacggtgtctctggatcagtatcagacggaggatgagctgtaccagctgtccctgcagcgggagccgcgctccaagtcctcgccaaccagccccacgagttgcaccccaccaccccggcccccggtactggaggagtggacctcggctgccaaacccaagctggatcaggccctcgtggtggagcacatcgagaagatggtggagtctgtgttccggaactttgacgtcgatggggatggccacatctcacaggaagaattccagatcatccgtgggaacttcccttacctcagcgcctttggggacctcgaccagaaccaggatggctgcatcagcagggaggagatggtttcctatttcctgcgctccagctctgtgttgggggggcgcatgggcttcgtacacaacttccaggagagcaactccttgcgccccgtcgcctgccgccactgcaaagccctgatcctgggcatctacaagcagggcctcaaatgccgagcctgtggagtgaactgccacaagcagtgcaaggatcgcctgtcagttgagtgtcggcgcagggcccagagtgtgagcctggaggggtctgcaccctcaccctcacccatgcacagccaccatcaccgcgccttcagcttctctctgccccgccctggcaggcgaggctccaggcctccagagatccgtgaggaggaggtacagacggtggaggatggggtgtttgacatccacttgtaatagatgctgtggttggatcaaggactcattcctgccttggagaaaatacttcaaccagagcagggagcctgggggtgtcggggcaggaggctggggatgggggtgggatatgagggtggcatgcagctgagggcagggccagggctggtgtccctaaggttgtacagactcttgtgaatatttgtattttccagatggaataaaaaggcccgtgtaattaaccttca

SEQ ID NO: 7337 - DNA, 1480 bp, Homo sapiens
actgaggcagggtagagagcgcttgcgggcgccgggcggagctgctgcggatcaggacccgagccgattcccgatcccgacccagatcctaacccgcgcccccgccccgccgccgccgccatgtacgacgcagagcgcggctggagcttgtccttcgcgggctgcggcttcctgggcttctaccacgtcggggcgacccgctgcctgagcgagcacgccccgcacctcctccgcgacgcgcgcatgttgttcggcgcttcggccggggcgttgcactgcgtcggcgtcctctccggtatcccgctggactctgcaggtcctctcagatcttgtgcggaaggccaggagtcggaacattggcatcttccatccatccttcaacttaagcaagttcctccgacagggtctctgcaaatgcctcccggccaatgtccaccagctcatctccggcaaaataggcatctctcttaccagagtgtctgatggggaaaacgttctggtgtctgactttcggtccaaagacgaagtcgtggatgccttggtatgttcctgcttcatccccttctacagtggccttatccctccttccttcagaggcgtgcgatatgtggatggaggagtgagtgacaacgtacccttcattgatgccaaaacaaccatcaccgtgtcccccttctatggggagtacgacatctgccctaaagtcaagtccacgaactttcttcatgtggacatcaccaagctcagtctacgcctctgcacagggaacctctaccttctctcgagagcttttgtccccccggatctcaaggtgctgggagagatatgccttcgaggatatttggatgcattcaggttcttggaagagaagggcatctgcaacaggccccagccaggcctgaagtcatcctcagaagggatggatcctgaggtcgccatgcccagctgggcaaacatgagtctggattcttccccggagtcggctgccttggctgtgaggctggagggagatgagctgctagaccacctgcgtctcagcatcctgccctgggatgagagcatcctggacaccctctcgcccaggctcgctacagcactgagtgaagaaatgaaagacaaaggtggatacatgagcaagatttgcaacttgctacccattaggataatgtcttatgtaatgctgccctgtaccctgcctgtggaatctgccattgcgattgtccagagactggtgacatggcttccagatatgcccgacgatgtcctgtggttgcagtgggtgacctcacaggtgttcactcgagtgctgatgtgtctgctccccgcctccagagtttggagcctcttccatcaagtggacctgattttggaggattaggagaagaagctgaatttgttgaagttgagcctgaagctaaacaggaaattcttgaaaacaaagatgtggttgttcaacatgttcattttgatggacttggaa

SEQ ID NO: 7338 - DNA, 5092 bp, Homo sapiens
cgattttgctctaaactgctgcatctgtctatgccaaactaatcaataccgattgcaccaccaaactccattgcaaattcagctgtgaggagattccctttcagacaactttgctgaaagcagcttggaaattcggtgtcgaagggtctgccacgttttcatgcttgcattttgggctccaaattggcactgggaaggggttactgagagcacaaggctgataccaggccctacttttaaacgttcatctacttacaatcctagtatttctctaaaaaccaaaacctctttgaattaacagtttcatgctgtgaatttctagtgggagatcttttccttgatattgacgacacaattttccatgtacttttaaagcagggagtggggaaaagtattttgaggggacattttcatcatcagttcagctttttttttttggttgttgctcttttttgggggggttgggtttgttggtttcactgaaacatttaactacctgtaaaatctaaacatggctgttagtgtcacaccaattcgggacacaaaatggctaacactggaagtatgtagagagttccagagggggacttgctcacggccagacacggaatgtaaatttgcacatccttcgaaaagctgccaagttgaaaatggacgagtaatcgcctgctttgattcattgaaaggccgttgctccagggagaactgcaaatatcttcatccacccccacatttaaaaacgcagttggagataaatggacgcaataacttgattcagcagaagaacatggccatgttggcccagcaaatgcaactagccaatgccatgatgcctggtgccccattacaacccgtgccaatgttttcagttgcaccaagcttagccaccaatgcatcagcagccgcctttaatccctatctgggacctgtttctccaagcctggtcccggcagagatcttgccgactgcaccaatgttggttacagggaatccgggtgtccctgtacctgcagctgctgcagctgctgcacagaaattaatgcgaacagacagacttgaggtatgtcgagagtaccaacgtggcaattgcaaccgaggagaaaatgattgtcggtttgctcatcctgctgacagcacaatgattgacaccaatgacaacacagtcactgtgtgtatggattacatcaaagggagatgctctcgggaaaagtgcaaatactttcatccccctgcacatttgcaagccaagatcaaggctgcccaataccaggtcaaccaggctgcagctgcacaggctgcagccaccgcagctgccatgactcagtcggctgtcaaatcactgaagcgacccctcgaggcaacctttgacctgggaattcctcaagctgtacttcccccattaccaaagaggcctgctcttgaaaaaaccaacggtgccaccgcagtctttaacactggtattttccaataccaacaggctctagccaacatgcagttacaacagcatacagcatttctcccaccagttcccatggtgcacggtgctacgccagccactgtgtccgcagcaacaacatctgccacaagtgttcccttcgctgcaacagccacagccaaccagatacccataatatctgccgaacatctgactagccacaagtatgttacccagatgtagaattttcatcactaaacaatcatgctaaagaggaaaggacagtgtgcttggttagagtaaaggacgaggtcattagccatattgtatatatcgtcaagcaacacacacaaaagttcctcagccacaagacatccacatattgcatgttaaccagaagaaaagacaacattttccggaaatccactgcacactgttgcctatacactttgtacatttaattgatatttgtgctgaggtgatattcctgtctaaaagaacaacattgtctttcttttctagcacagagttatgcattcaaagatgcatacctagttagtttcctatatattcatgccatcttgaaaagacagactatggtgtaaccatgattctattatgtattggtacgtctgtagaccaagatataattttttaaaaataagtttatttctttcaaggtttacaaataacaaaggtgcaccttgtatttaaaattgccattatagatgagagcgtgcatgcacagtcatttttgtttaagagtaatatttttaatgtaatagattgtaagacgtggtgagggagggatctgacagagatgaatgtgccaagcaaaaccacaactgtgtatattttaaagcacatcatggctttaagtaccatgttgttaaggattctcatgaagtgccatagactgtacatcaaattagagtattatttcttcagtgttattgttttcagagccacattttgttgcatatttgctagtactaatcagtcaaagggcaccattctttttttttttttttgaaaccaaagctgtctcagaaatggccaatttaactttacagtaacaatagacagcacaacacaaactctctcaatacagataaactcacacatactggagatatatatataatagatatatataaaattattttaatgcattgtagtgtaatatttatgcatactatactgtataacatgttattcaaaagggattgccatttctgagacacagtaacaaaaaaatgaggaaattattttgcttctatttatagcctctgtcaaaagtcaaaagactataaatgctttgcaaaaatggtttcacgtttgcttaaatgcttcatcacagtcacattcaaaatagtgactctaaacaaagaagaaagcagcactgtcatcagatgcatgataaaccaaaatatgaaaatgggaaatgtttaattaacctagtaattgggtgggttaagtacatgggtgaattttatatgtgatttttgttttgttttgttttgttcagattaactgcttatagccttagaaagccttttacaaaattaaaaaaaaaatagatgtgcattcagtttttaagaatggaatcatccaaaggaattcctttttttgaggtttggatgttgcagctagtaaaggatatttttgctctgttcagcagttctaaaaattgctgaagtaggggccaggtcactggtagttatagtatggaatgggagaagtgaaagttcagttatagaactttccatacttccaagtttactgcaagtttttatgcttgagagagatgctttctaatataagactgatgtgttgattttactgattgtactgtacatctattaaagccttagattattacattacgggttggaacccataccaatgtaatttcaatcgtgttaagaaagtaatggtgacttcacatgttattgtagttagttacattatagaatattacttatttttcttgttaaaatgtagtttttcatttcctacatttattagattttcattttctattaacaattgaataccatttcagtttatagacttgttttattagattttaccaatgaatttttcaaaatacaaaaaaaagtagtttttccttcataacatactcagttttgaattacatgtagtgtcacatgaatattcgtattgttaactaaatgatttatattttactgatttaatattacagtgtaagaatgtcagtcattgttagttcttgtctagttttcattaaaagaacaaagatcttttatatggatatcttataaatatataatcattgctaagtaagaagttaagttgttgctatcgcaacaatcctggcagacaattgagtaatattttgatgatttattttgtttgtaattagttattataagaagatctagatcctagatattagaataaaatttattttctactgtatccatttcaaatgttaaaatattgtttaatatttttgaaatccctgagtatcaggccttgttataaataagctgcataatcaataaatagaacaagggactttttgttgataatccaaatactcaaagtttacgtaatgaaaattatagcgtgtgtgcaaactcttgagggttgattatgctgcaatttagcatgttggaacgtctagggagaaggttgactttttgcacttctgtatatagtcaaaagagagaaacctgtataatagtaagatcttattttgaataaaaacgtctataattacaaggagttttgttaaggctaatacaatgacagactgagcaaaattgcttgcaaaagtggcacagagttagcactccataccccttcaaacatgttgctttgctttcttgtggacagcttgtagtttgccaggattttttcagctggaaagatacgccatcctttcaaaccctcatgactgacaaaaactccatggggccaaatctgcctgaagatcattaccaaaaatagcaggtacttctaccattaaggtgaaatcatggatcagatattccttacatttttcaaaactactgcatgtttaaaacttcaacaaaaaaagagagaaagaactatactaagaacatatattattcagatcagtttctgccaatttcagtggtttattgttcacaaaaaaatcttcaaaacaagtattgactttcacaaaatttaaatcataaacaggcaaaccaaacagcacactgtagctatagttgttatgtgattgttttttaattgctgtaggatcctgttctttcagcaggtgaaaaataaaacgcagttcaaatttcatggttttaattttcaactcagaagcactcaaaaatgcaaaatgtgataatgggcacttgtttaaaagaattagtgtatccagccttcactccagctggttaaaaatgttgcacttatcagcaaccctaccactttcatctgctgaaaggacaaatgtgcttggttttactattatgtaatcacaacttactttctgcttgtagttgcttaaaattatgtattttgtcttgggctgcaatttgttttatgcttattttattattactgcagtagttgactttgctgtatggaaaaataaagtgaaattgccctaataaaacttctctttcttaagta

SEQ ID NO: 7339 - DNA, 1118 bp, Homo sapiens; identical to SEQ ID NO: 4106

SEQ ID NO: 7340 - DNA, 861 bp, Homo sapiens
gcgggcggcgacggagccgggatcggtgcctcagcgttcgggctggagacgaggccaggtctccagctggggtggacgtgcccaccagctgccgaaggccaagacgccaggtccggtggacgtgacaagcaggacatgacatggtccggtgtgacggcgaggacagaggaggcgcgtccggccttcctgaacaccttaggctggtggggctgcggcaagaagcgggtctgtttctttacttcctccacggagtcggcacactatggctgccctctgggctcccagaacccacaacatgaaaggtgaggggcttcctgccacacttggggtggggggcacgcgagaggagctgagtgggacctcactccttccccatccacagaaatggtgctacccagctcaagcctgggcctttgaatccggacacaaaaccctctagcttggaaatgaatatgctgcactttacaaccactgcactacctgactcaggaatcggctctggaaggtgaagctagaggaaccagacctcatcagcccaacatcaaagacaccatcggaacagcagcgcccgcagcacccaccccgcaccggcgactccatcttcatggccaccccctgcggcggacggttgaccaccagccaccacatcatcccagagctgagctcctccagcgggatgacgccgtccccaccacctccctcttcttctttttcatccttctgtctctttgtttctgagctttcctgtctttccttttttctgagagattcaaagcctccacgactctgtttcccccgtcccttctgaatttaatttgcactaagtcatttgcactggttggagttgtggagacggccttg

SEQ ID NO: 7341 - DNA, 2064 bp, Homo sapiens
acaccagccctcagtcactgggagaagaacctctcataccctcggggaataaaagcttcattcctgagtcagtgagagcttcaatgaagcccagatgtcattcgtgctgaaagaaccagaacaactctctgctccctgccaagcatgaagcggttgtgaccccaggaaaccacagtgactttgactctggttcagctgacatgctcgagtctagccacaaattaccagaaagcagctgaggaaagtttagaatttctcctggcagagatggtccacgagtctggctccagggtgaaccccttcttcccagagcagcacggggccctttggaggctcgactccgccagccctcccactgccttccccctgccttccccaccctcacttcggttgagttttgccttcaaaatagcagactccaagccacctgaagggctgcagaacagcgttgttgacagcttcaagtcgccttgtggcttctctgagctgctgctgtgctttggaaacaaaattccaggctctccctctttctgtgtgtgggaaacaccggagagagtttggggagggagacaaaagggcccattgaaaacccagacaggcttgaactgtgctccagtccccagctcactcagccacacacaccatgtgtgaagaggagaccaccgcgctcgtgtgtgacaatggctctggcctgtgcaaggcaggcttcgcaggagatgatgccccccgggctgtcttcccctccattgtgggccgccctcgccaccagggtgtgatggtgggaatgggccagaaagacagctatgtgggggatgaggctcagagcaagcgagggatcctaactctcaaataccccattgaacacggcatcatcaccaactgggatgacatggagaagatctggcaccactccttctacaatgagctgcgtgtagcacctgaagagcaccccaccctgctcacagaggctcccctaaatcccaaggccaacagggaaaagatgacccagatcatgtttgaaaccttcaatgtccctgccatgtacgtcgccattcaagctgtgctctccctctatgcctctggccgcacgacaggcatcgtcctggattcaggtgatggcgtcacccacaatgtccccatctatgaaggctatgccctgccccatgccatcatgcgcctggacttggctggccgtgacctcacggactacctcatgaagatcctcacagagagaggctattcctttgtgaccacagctgagagagaaattgtgcgagacatcaaggagaagctgtgctatgtggccctggattttgagaatgagatggccacagcagcttcctcttcctccctggagaagagctatgagctgccagatgggcaggttatcaccattggcaatgagcgcttccgctgccctgagaccctcttccagccttcctttattggcatggagtccgctggaattcatgagacaacctacaattccatcatgaagtgtgacattgacatccgtaaggacttatatgccaacaatgtcctctctgggggcaccaccatgtaccctggcattgctgacaggatgcagaaggagatcacagccctggcccccagcaccatgaagatcaagattattgctcccccagagcggaagtactcagtctggatcgggggctctatcctggcctctctctccaccttccagcagatgtggatcagcaagcctgagtatgatgaggcagggccctccattgtccacaggaagtgcttctaaagtcagaacaggttctccaaggatcccctcgagactactctgttaccagtcatgaaacattaaaacctacaagccttacttctctgtgtggggctcttttttcctgggctatgtctcatacacagtgctaaggacttttcacacattacttttaatccatgcaatagtgctgtaaggtaggtgctatcattatacccatattacagatgaggaaattgaggctcagagaagtcaaggacttgcgaagatcacacagattccagattaaaattcaagtatctgactgcaaa

SEQ ID NO: 7342 - DNA, 4108 bp, Homo sapiens
aaggctacctggctgggaccacagatggagtctcgctctatcacccaggctggagtgcaatggcgcgatcttggctcaccgcaacctccatctcccaggttaaagcgattctcctgcctcagtctcctgagtagctgtgattacaggcgtgcgccatcacacccagctaatttttgtattttttagtagagatggggtttcaccatgttggcctaactcctgacctcgtgatctgcccatcttggcctccgaaagtactgggattacaggtgtgagccactgcacccggcccaaacatttctttttcttttcttttgagacagagtcttgctctgttgcccgtggctggagtgaaatggtgcgattatagttcactgcagcctcaaactcctggccttaagcgatcctcccatcctggcctcccaaagtgctgggattataggcatgagccgcagcaaccactcctcacatttcttgagcatctgtgatgtatcaagccagatgctgggcactgaggttgcagaaggcattgttcctgtcttctaggagccccaggctagcagggaagacggatgtgtatagagttaaccacaataccaggcctcaacttcccgtctgtaacacaggtggaccatgctagattgtcccagcctgccctgtgcttcattagccggtcaacagatccatctcaaatacctcccatgggtactcactgattgctttaacccaaaccatggcactcttgaagactttccctcaggaagctcaaggactatgcatccttctgggtcagaactggacacacagccaccagtgctggacaatggcggcggctcagggacacactggagccctggcccctgcagagctcccagcatggttgggaagagagatgcaaaatgaccacacggcgggtgaggaggagctccctcggtgcggctgggatgagccctagacactctcaatcacccccacgatgaccccttcccagaggtcccctcagtcatctgccctgaaccaagctcttcctgatcctagaccctccaccctccctctatcttccagggcttggtgacattccaggcagaaatttctgacccttttactttggtccctccctccccagcccagtctctggtcaaactggattcctggctgttcccagaacgagctgcctttccccaccttgccacctctgcccttgttctctctgcctgaatgtcctccttcactagcctcgctgccttgcacatctctcctgagggctgtcatcccagaatgagctgcatttgtccagcctggcccaccgtctaccagaacgtcctccttcagcctgtcccactgccttgcaaaacttttctgggggacctgttcacgatgccttctgtagcatactccaagaatccggcgccccctggagttgtgccacacagcacccctttgcagtcaagctccctcagcaccaccacctccaccctggaagagttccccttccctttgaaatctcatgggactttgcacccactctggctttattggaaggctttgtatgtctccacagggtaaacacccatttactggggtgatgatgtctccaggatctagttcatgtttgtcgttggtgactggccccacccagttctgggcaagcaggctggatcccggcaggaacagagcccaccagcctaaacttccatggaggtggagaggggacaggcttctgtctctttttggctgaaggtgcatcatgtccaaggcccctcttctagccaagcagagaagctgggtgataaggatgggtgagagtgggtgatgtaccccggagtcctggcctcccggctcctcactcccctacacgtaactttatccggccaatgccgcaaagactgctggtgaggccagatgcatgagtgatcatactcacaacagtcgtgaaactgccagtgatgaaactggtaaggacaagaaatgacaataatcaaggtggggtttctcgtggacgtttccaagacttcattctcaaattctctccctcagggtccccaccctgtcctcccacctaagcctggaatgagggggcactggcctgtggggaccctggtcttcaggctcccaaacctggctgggtctggttgccccctggccttaacctgtgaacatccagctgtccctgggctgtgattcagtgtctgtctcccgggtgacctcagcatgggctttgaggaaggggagagagtagtttcttctgagactggatagtgactcagggacccggggctggggcctcaaaagtgcctttgttggcctgggctcaggaatccagagaaactggtcaggaggaggccccagtgacaaaaacccctccctctgcccccgcccctctgccagagccatataactgctcaacctgtccccgagagagagtgccctggcagctgtcggctggaaggaactggtctgctcacacttgctggcttgcgcatcaggactggctttatctcctgactcacggtgcaaaggtgcactctgcgaacgttaagtccgtccccagcgcttggaatcctacggcccccacagccggatcccctcagccttccaggtcctcaactcccgtggacgctgaacaatggcctccatggggctacaggtaatgggcatcgcgctggccgtcctgggctggctggccgtcatgctgtgctgcgcgctgcccatgtggcgcgtgacggccttcatcggcagcaacattgtcacctcgcagaccatctgggagggcctatggatgaactgcgtggtgcagagcaccggccagatgcagtgcaaggtgtacgactcgctgctggcactgccgcaggacctgcaggcggcccgcgccctcgtcatcatcagcatcatcgtggctgctctgggcgtgctgctgtccgtggtggggggcaagtgtaccaactgcctggaggatgaaagcgccaaggccaagaccatgatcgtggcgggcgtggtgttcctgttggccggccttatggtgatagtgccggtgtcctggacggcccacaacatcatccaagacttctacaatccgctggtggcctccgggcagaagcgggagatgggtgcctcgctctacgtcggctgggccgcctccggcctgctgctccttggcggggggctgctttgctgcaactgtccaccccgcacagacaagccttactccgccaagtattctgctgcccgctctgctgctgccagcaactacgtgtaaggtgccacggctccactctgttcctctctgctttgttcttccctggactgagctcagcgcaggctgtgaccccaggagggccctgccacgggccactggctgctggggactggggactgggcagagactgagccaggcaggaaggcagcagccttcagcctctctggcccactcggacaacttcccaaggccgcctcctgctagcaagaacagagtccaccctcctctggatattggggagggacggaagtgacagggtgtggtggtggagtggggagctggcttctgctggccaggatagcttaaccctgactttgggatctgcctgcatcggcgttggccactgtccccatttacattttccccactctgtctgcctgcatctcctctgttccgggtaggccttgatatcacctctgggactgtgccttgctcaccgaaacccgcgcccaggagtatggctgaggccttgcccacccacctgcctgggaagtgcagagtggatggacgggtttagaggggaggggcgaaggtgctgtaaacaggtttgggcagtggtgggggagggggccagagaggcggctcaggttgcccagctctgtggcctcaggactctctgcctcacccgcttcagcccagggcccctggagactgatcccctctgagtcctctgccccttccaaggacactaatgagcctgggagggtggcagggaggaggggacagcttcacccttggaagtcctggggtttttcctcttccttctttgtggtttctgttttgtaatttaagaagagctattcatcactgtaattattattattttctacaataaatgggacctgtgcacag

SEQ ID NO: 7343 - DNA, 134 bp, Homo sapiens
caggagcggccatgaagaagctgatggtggtgctgagtctgattgctgcaggaatcttcaggtcttcctggggaagcataaccttcggcaaagggagagttcccaggagcagagttctgttgtccgggctgtga

SEQ ID NO: 7344 - DNA, 519 bp, Homo sapiens
atgaaggccactatcatcctccttctgcttgcacaagtttcctgggctggaccgtttcaacagagaggcttatttgactttatgctagaagatgaggcttctgggataggcccagaagttcctgatgaccgcgacttcgagccctccctaggcccagtgtgccccttccgctgtcaatgccatcttcgagtggtccagtgttctgatttgggtctggacaaagtgccaaaggatcttccccctgacacaactctgctagacctgcaaaacaacaaaataaccgaaatcaaagatggagactttaagaacctgaagaaccttcacgttgtctaccttcataacaacaatatctctgtagttggatcaagtgacttctgcccacctggacacaacaccaaaaaggcttcttattcgggtgtgagtcttttcagcaacccggtccagtactgggagatacagccatccaccttcagatgtgtctacgtgcgctctgccattcaactcggaaactataagtaa

SEQ ID NO: 7345 - DNA, 1025 bp, Homo sapiens; identical to SEQ ID NO: 6638

SEQ ID NO: 7346 - DNA, 5417 bp, Homo sapiens
ccctccctccccctttcagaacactcaatgtcggaacgttccgaagatgacgtcggagcgttctcgaatcccgtgtctctcggctgctgctgccgaaggaacagggaaaaagcaacaagaaggaagagcaatggcgacactggatcgcaaagtgcccagtccggaggcgtttctgggcaaaccctggtcctcctggatcgacgccgccaaattacactgctccgacaatgtagatttagaagaggctggaaaagagggtggaaaaagcagggaggttatgaggcttaataaagaagatatgcacttatttggccattacccagcacatgacgacttctatctcgtagtgtgcagtgcctgtaaccaggtcgtcaagccacaggttttccagtcgcactgcgagagaagacacggttcaatgtgtagaccttctccctctccagtgtctccagcctccaatcccaggacatcactagtacaggtgaaaacaaaagcctgtctcagcggccatcactctgccagcagcacctcaaagccattcaaaacgcccaaagacaatctacttacctccagcagcaaacagcacacagtctttcctgcgaaaggatcaagggataaaccatgtgttccagttcctgtagtcagtttagagaaaattcctaacctagtgaaggcagatggtgccaatgtcaaaatgaactccacaaccactactgcagtttctgcctcctccacctcgtcctctgccgtctccacccctcctttaattaagcctgtcctgatgtccaagtcagtgccaccttcaccagagaagatcttaaatggcaaaggaattctgccaaccaccatagacaagaaacaccaaaatggcaccaaaaacagcaacaagccttacaggagactttcagagagagaatttgacccaaataaacactgtggagtattggatcccgagacaaagaaaccttgcacaagatccctcacctgcaagacacattcgctaagccatcggagggcagtcccaggccggaaaaagcaatttgacctcctcctggcagaacacaaagcaaagtcccgggaaaaagaagttaaagataaagagcatctcctgacttccacgagggaaatacttccaagccaatccgggccggcacaggattctctgctagggtcttcagggagctctgggccagaaccaaaagttgcatcccctgcaaaatccagaccacccaactctgtacttcctagaccatcatctgcaaatagcataagcagcagcacatcttcaaatcatagcggccacactccagagcccccactcccaccggttggaggtgacctcgccagccgactgtccagtgatgaaggggagatggacggagccgacgaatccgagaagctagactgtcagttctccacgcaccaccccagacctctggcgttttgctcatttgggagtcgcctcatgggacgagggtactatgtgtttgatagaagatgggatcgttttcgattcgcactaaactccatggtagaaaaacacctgaattcacagatgtggaagaagatccctcctgcggcagatagccccctgccctcgccagcagcccacatcaccacccccgttccagcatccgttttgcagcctttcagcaaccccagtgctgtgtatcttccttcagctcccatcagctcgaggctcacctcttcttacataatgacatcagccatgctctcaaacgcagctttcgtgacatcgccggacccgagcgccctcatgtcccacaccacagctttccctcatgtggccgcaaccctcagcatcatggactcaaccttcaaggccccatccgccgtgtccccgataccagccgtcatcccttccccatcccacaagccatccaaaaccaaaaccagcaaatcctcaaaagtcaaagacctgtccacccgtagcgacgagtctccaagtaacaaaaaaaggaagccacagtcttcgacttcctcctcctcctcctcctcctcctcttccttgcagacatccctctcgtctccactgtcagggcctcacaaaaagaactgtgttttgaatgccagttctgctttgaactcctatcaggcggcccctccctataacagcctgtctgtgcacaactcaaacaatggggtgagcccactcagtgccaaactggagccctcaggacggacctcgctgcccggcggccccgcggacatagtgagacaggtgggcgcggtgggaggcagcagtgactcctgtcccctctctgtgccctcccttgcgctccacgcaggggacctctctctggcctcacacaatgctgtgtcttctctgcccctctcttttgacaaatcagaaggaaaaaagcgtaagaactcgagttctagtagcaaagcctgtaaaatcactaaaatgcctggtatgaatagcgttcacaaaaagaacccgcccagccttctcgcaccggtgcccgatcccgttaacagcacctcctctcggcaggttgggaaaaatagcagcctagctttgtcacaatccagtccttcaagtatatccagcccaggacacagccgacagaacacaaacagaacgggcaggataaggactcttccataacaagactatgaagccacttccacatcaattccaggccacctaatcccatccgaggaggccatggggaggaggagggaggggagtgggctggggggagagtctgttttctgtgcactccctgtgactctggcctttcttcttctttttttaattgaccaatttttagttaaaaaggcaaaagaaggtgaatttgagatttacagaaaacagttccagtgtttggtttccgctgtctttcctttcatttgccatgtttttacattcttccaaatttggggtcactcccctagctcctgatgctgctactgtaccatccttttgctccagccatgagagcagacattgcagaatgttggttccaggttggcatgctctgaagctcttgaactgtagcacaggcagagccctttttcttcctgtcatctccacccgattccttccatccctacgtctaccactctctgggtcctcactggtcttcaaaggacctggctctcataggatcccctcaggattgtgtgcagggagagggggctttgctggggaggagctgggagtggagagttggagggtgggtggggttccctcatccagtttccacagcccaccatggctggagccaaatgctagaagcgagattgagaacagtggccgtttagtgatgtggtttacctaataccactgtccagctgtgcagctcagaaaggataaaccagtcagggacaggggccagaacaggtttgggaaggtggcagcaagcagagcatggtgggtaggagatgatccctaaaaaaactggagactgtggtggtctgagctggtcaggaatctgcagaatcccttccaggaatcagtgtgccagtgcccacagcagggtgagctaggagggagaaatcccaggaaaaaggtcgtgagaacccagaaagccactccatgaggaggcacggtgaccacagctgctaaaggttcttaggctgccttcctgggctaggaagagccccccagggagagcttccacaaaagggtatgtgtcaaaccttttgtcagaataaataatagcatttcccacccacccccatgccctgggccacagggacttggtgggatcagcacacccatggatcagcttttgctgtcttagagacagccatccccatgaaggaatggtaaggacagccactgctcagtgaagaacagccatttggaagagccacgctggagccctgcagccatagaactattcacactggagttttaaaagaaacagcaataccataagctctagtagggaatcataatcaggaaaggaattcacaacataaaataggtgttctgtgctattaatcatgtaactttgtatatgatgtatagcaaagatactgggaggttttgtttcatccttaaatcagaaatgaatgctagtttcatagctgggcagaaccctcatccccaccccaaagttttccttttctttcccgttcccccaacccaaagatcagactactgttaagtttcaccacacaattggaattgcaaagacgggaggcaaatggagtgattttcatcaatggaattgcactgacagtgagtgtttcttataggattactaaattttttaatataaaatgatttgtttaaaaatcaggagttgatattaagtaccaggacattagttcggatgatttcatttttatttctacagtgttaaaagtgcacttatatgctggtttatttacgtcttgggaaaagagactgcaaattgaagggatgattgttactttttctttttttaaaaaaaaaaggttaaggagattttaagacttataaatgtttaagaaattataaacaaggttagaccctttgaaaaaaagtttagaagatattcttaaagtaaatttttatagtgttaattttgtaataatttatgttttactatattacagagctaactgaccagaatagtttcagaaacaatatgaaacttaggaaagtttaagcaatgtttatatttttaaaatgttctttgaattatgtttttattgtacatttcttcagactgaaaagtatgtacatatctttgttatttttgcacaattttgtcttgttcggtttcagaggtctgttgttttttataatttattttgagttgtaaaacttgcaggagtaaaaacaaaaaacaaaatctccacaacaaaataaccctctgatttataaactcttatagtcaaagagggaaaacaaaggttgagagattaagtggctgcttctgagaaataatgtctcaaggactaaaggagcaattcaataggtttagacattgtagctctctacatcttgaattggaagctggaataaagagcccccacccccccccccaccctcatcgaatgctgcttactttgtcaaaagactggctatgaccaaggtgaggatatttctggaaaactgggcaaaaagggaaagcccacagtattcttccttggcagtcaaccacaggtttactttacaatgatgtattaaaaacttgcagcttgaaaaatggaatgcaaataaaaggttctctttgggtttgtcttaatggagttaaactggagcagcctataaaacatttttagggtgatgtcctctgggtccttctgttctgcacacccactcagtcttctctcccagccccttgactgcacacacccctctttgcctgaagatctcctgacttgtcgccagccatagaggctcgaaagctctggttgtgaagcataacgcaatgcatagacctgtcagccat

SEQ ID NO: 7347 - DNA, 1791 bp, Homo sapiens
gctaatgaatgaatgtgatcatttaaaagaaagtctctttcagtatgagagagagaaaacagaaggagtagtggttgtgagacaacttcaacaagaagtggctgacagcgtaaaaaaattaacgacgttagagtctccactggaaggtatatcacgttgtcacattaatttggatgagacacaggcctcaaataagaaattatttcaagtgaaaagtcaaatataagaaactcctggaaatgacaataaatatgttaaatgtatttggaaatgaagactttgattgccatggagacttaaaaacagatcaactgaaaatggatattctgattaagaagctaaaacagaagtttgatgatcttacggcagagaaggaagctttatcttcaaaatgtgtcaatttggctaaagacaatcaagttcttcaacaggagtttttatctatgaaaaaagtacaacagcaatgtgagaaacttgaggaggataaaaagatgttgaaagaagaaatattaaatcttaagacacatatggaaaacaatagggtagaacttagtaaactacaagaatataaattggagctagatgaaaaggcagtgcaggcagtagaaaaattagaagaaatccatttacaggaacaagcacaatatgaaaaacaattagagcagttaaacaaggataatatggcttcactaaataaaaaggaactcacacttaaagatgtggaatgtaaattctcagaaatgaaaactgcttatgaagaggttacaaccgaattagaagaatataaggaagcctttgcagcagcattgaaagctaacaattccatgtcaaaaaaattaacaaaatcaaataagaaaatagcagtgatcagcatgaagctccttatggagaaagagcagatgaaatattttctcagtgctcttcctacaaggcgagacccagagtcaccttgtgttgaaaatcttactagtataggactcaacagaaaatatattccccaaacacccataagaattcctatttcaagcccacagacttcaaataactgcaagaactcttagactgtgatggagctggactgtgtagaacaaataactagagaaacaaagagaattgttgctgtgttgaacacttgctcccgtctacttacttctctataatccactgccatggaatgagtgatttttcttagaagcagaggtggagccactgaggaagcacaggcgagccctccccagcacgtgctcactggtccccaacagaacaaccgctgccgcatccatgaggctcccattgtggtgggttgtgtcaccccacaatgtcactgttgctgagcccccatcgcctctgtgttgtggagcagttagagacacactgtggtgtctgagtggctctgcgtgaaggaccgttttctaggtgagaggcacatctcaacacagctgactgatcagactcagccgttttgcacaccctggtcagaatgaaacattccttgggaactcgggccgtgagaagcatccttcctgatcacctgactgtagaaacatccttatcgcaccctcccgggcaaaggcccaacagcctgactgcaggaacatccttgccatatcctgccgggcagcaagctctaccgcccacacccctccttcccagtcccatgatcaccccagcctgtgagaggcagttggtgctggcagtaagctggtttcctcctctgcagggttttgctagtaataaaggtgttgctgttgaagccgtcaactgtctttctctgtctttctttaacccttg

SEQ ID NO: 7348 - DNA, 4490 bp, Homo sapiens
actgagcatttctaagggagttgaggctggtggctcctccttccttcctactggtgcttccacctgccttggtctgagttgcagtccatggggcagcgcctaagtgtctgagcacacttaagaatctctagtggtttatgacccagactttgccctaccacctcagtcttctgaatgttctcttccctggaccctgctccagacactttaaattcagaagaggaaaatgtgcccagcctgcctggagaaaagtgtctgctcctagccaagatctcctcatcacaaaagtaatgtgggccatggagtcaggccacctcctctgggctctgctgttcatgcagtccttgtggcctcaactgactgatggagccactcgagtctactacctgggcatccgggatgtgcagtggaactatgctcccaagggaagaaatgtcatcacgaaccagcctctggacagtgacatagtggcttccagcttcttaaagtctgacaagaaccggatagggggaacctacaagaagaccatctataaagaatacaaggatgactcatacacagatgaagtggcccagcctgcctggttgggcttcctggggccagtgttgcaggctgaagtgggggatgtcattcttattcacctgaagaattttgccactcgtccctataccatccaccctcatggtgtcttctacgagaaggactctgaaggttccctatacccagatggctcctctgggccactgaaagctgatgactctgttcccccggggggcagccatatctacaactggaccattccagaaggccatgcacccaccgatgctgacccagcgtgcctcacctggatctaccattctcatgtagatgctccacgagacattgcaactggcctaattgggcctctcatcacctgtaaaagaggagccctggatgggaactcccctcctcaacgccaggatgtagaccatgatttcttcctcctcttcagtgtggtagatgagaacctcagctggcatctcaatgagaacattgccacttactgctcagatcctgcttcagtggacaaagaagatgagacatttcaggagagcaataggatgcatgcaatcaatggctttgtttttgggaatttacctgagctgaacatgtgtgcacagaaacgtgtggcctggcacttgtttggcatgggcaatgaaattgatgtccacacagcatttttccatggacagatgctgactacccgtggacaccacactgatgtggctaacatctttccagccacctttgtgactgctgagatggtgccctgggaacctggtacctggttaattagctgccaagtgaacagtcactttcgagatggcatgcaggcactctacaaggtcaagtcttgctccatggcccctcctgtggacctgctcacaggcaaagttcgacagtacttcattgaggcccatgagattcaatgggactatggcccgatggggcatgatgggagtactgggaagaatttgagagagccaggcagtatctcagataagtttttccagaagagctccagccgaattgggggcacttactggaaagtgcgatatgaagcctttcaagatgagacattccaagagaagatgcatttggaggaagataggcatcttggaatcctggggccagtgatccgggctgaggtgggtgacaccattcaggtggtcttctacaaccgtgcctcccagccattcagcatgcagccccatggggtcttttatgagaaagactatgaaggcactgtgtacaatgatggctcatcttaccctggcttggttgccaagccctttgagaaagtaacataccgctggacagtcccccctcatgccggtcccactgctcaggatcctgcttgtctcacttggatgtacttctctgctgcagatcccataagagacacaaattctggcctggtgggcccgctgctggtgtgcagggctggtgccttgggtgcagatggcaagcagaaaggggtggataaagaattctttcttctcttcactgtgttggatgagaacaagagctggtacagcaatgccaatcaagcagctgctatgttggatttccgactgctttcagaggatattgagggcttccaagactccaatcggatgcatgccattaatgggtttctgttctctaacctgcccaggctggacatgtgcaagggtgacacagtggcctggcacctgctcggcctgggcacagagactgatgtgcatggagtcatgttccagggcaacactgtgcagcttcagggcatgaggaagggtgcagctatgctctttcctcatacctttgtcatggccatcatgcagcctgacaaccttgggacatttgagatttattgccaggcaggcagccatcgagaagcagggatgagggcaatctataatgtctcccagtgtcctggccaccaagccacccctcgccaacgctaccaagctgcaagaatctactatatcatggcagaagaagtagagtgggactattgccctgaccggagctgggaacgggaatggcacaaccagtctgagaaggacagttatggttacattttcctgagcaacaaggatgggctcctgggttccagatacaagaaagctgtattcagggaatacactgatggtacattcaggatccctcggccaaggactggaccagaagaacacttgggaatcttgggtccacttatcaaaggtgaagttggtgatatcctgactgtggtattcaagaataatgccagccgcccctactctgtgcatgctcatggagtgctagaatctactactgtctggccactggctgctgagcctggtgaggtggtcacttatcagtggaacatcccagagaggtctggccctgggcccaatgactctgcttgtgtttcctggatctattattctgcagtggatcccatcaaggacatgtatagtggcctggtggggcccttggctatctgccaaaagggcatcctggagccccatggaggacggagtgacatggatcgggaatttgcattgttgttcttgatttttgatgaaaataagtcttggtatttggaggaaaatgtggcaacccatgggtcccaggatccaggcagtattaacctacaggatgaaactttcttggagagcaataaaatgcatgcaatcaatgggaaactctatgccaaccttaggggtcttaccatgtaccaaggagaacgagtggcctggtacatgctggccatgggccaagatgtggatctacacaccatccactttcatgcagagagcttcctctatcggaatggcgagaactaccgggcagatgtggtggatctgttcccagggacttttgaggttgtggagatggtggccagcaaccctgggacatggctgatgcactgccatgtgactgaccatgtccatgctggcatggagaccctcttcactgttttttctcgaacagaacacttaagccctctcaccgtcatcaccaaagagactgaaaaagcagtgccccccagagacattgaagaaggcaatgtgaagatgctgggcatgcagatccccataaagaatgttgagatgctggcctctgttttggttgccattagtgtcacccttctgctcgttgttctggctcttggtggagtggtttggtaccaacatcgacagagaaagctacgacgcaataggaggtccatcctggatgacagcttcaagcttctgtctttcaaacagtaacatctggagcctggagatatcctcaggaagcacatctgtagtgcactcccagcaggccatggactagtcactaaccccacactcaaaggggcatgggtggtggagaagcagaaggagcaatcaagcttatctggatatttctttctttatttattttacatggaaataatatgatttcactttttctttagtttctttgctctacgtgggcacctggcactaagggagtaccttattatcctacatcgcaaatttcaacagctacattatatttccttctgacacttggaaggtattgaaatttctagaaatgtatccttctcacaaagtagagaccaagagaaaaactcattgattgggtttctacttctttcaaggactcaggaaatttcactttgaactgaggccaagtgagctgttaagataacccacacttaaactaaaggctaagaatataggcttgatgggaaattgaaggtaggctgagtattgggaatccaaattgaattttgattctccttggcagtgaactactttgaagaagtggtcaatgggttgttgctgccatgagcatgtacaacctctggagctagaagctcctcaggaaagccagttctccaagttcttaacctgtggcactgaaaggaatgttgagttacctcttcatgttttagacagcaaaccctatccattaaagtacttgttagaacactg

SEQ ID NO: 7349 - DNA, 2524 bp, Homo sapiens
tgatgaatatgaactatctccagcccatcaccagctttttctttttcttcttgtccttatttgttttttagttctttataagaaaaagtgggggatatattgagaagtaccaagacggggagctatgggtttattgacaaaagagcataggacactaaaatagaaacgaagttattatttttctcttgtgatactctaagagaaaagctcttcctggaaaagccgatgatctctgaagatgctaaataaatgagcaggagtttccctgaaatggaggcgccctttgattggctgatctttccccgactcctgccaatcggagcatccctgggctccagctccataaacataagcaaagctacatgcttattcttctggacttggagtgtataccatttaaaggtgtgcggcgggtctctgttcacatggctcaactggaaacctgtttcatgaacaagcttactcaggaaccatctggtggtattccagcacattgttcttcagggggacgactctaagtcgctttgtggtggcagcagcttagaatcagtatttgtggttgggaaagatggacttacgggagcttggtaatgcaggtggtgaaggagcaggttatgagagcacttacaaccaagcctagctccctggaccagttcaagagcaaactgcagaacctgagctacactgagatcctgaaaatccgccagtccgagaggatgaaccaggaagatttccagtcccgcccgattttggaactaaaggagaagattcagccagaaatcttagagctgatcaaacagcaacgcctgaaccgccttgtggaagggacctgctttaggaaactcaatgcccggcggaggcaagacaagttttggtattgtcggctttcgccaaatcacaaagtcctgcattacggagacttagaagagagtcctcagggagaagtgccccacgattccttgcaggacaaactgccggtggcagatatcaaagccgtggtgacgggaaaggactgccctcatatgaaagagaaaggtgcccttaaacaaaacaaggaggtgcttgaactcgctttctccatcttgtatgactcaaactgccaactgaacttcatcgctcctgacaagcatgagtactgtatctggacggatggactgaatgcgctactcgggaaggacatgatgagcgacctgacgcggaatgacctggacaccctgctcagcatggaaatcaagctccgcctcctggacctggaaaacatccagatccctgacgcacctccgccgattcccaaggagcccagcaactatgacttcgtctatgactgtaactgaagtggccgggcccagacatgccccttccaaaactggaacacctagctaacaggagagaggaatgaaaacacacccacgccttggaaccgtcctttggtaaagggaagctgtgggtccacattcccttcagcatcacctctagccctggcaactttcagcccctagctggcatcttgctcaccgccctgattctgttcctcggctccactgcttcaggtcacttcccatggctgcagtccactggtgggacaagagcaaagcccactgccagtaagaaggccaaagggcccttccatcctagccctctgcaggcatgcccttccttcccttgggcaggaaagccagcagccccagactgcccaaaaacttgcccaccagaccaagggcagtgccccaaggcccctgtctggaggaaatggcctagctatttgatgagaagaccaaaccccacatcctcctttcccctctctctagaatcatctcgcaccaccagttacacttgaattaagatctgcgctcaaatctcctcccacctctctccctgcttttgccttgctctgttcctctttggtcccaagagcagcagccgcagcctcctcgtgatcctccctagcataaatttcccaaacagtccacaggtcccatgcccactttgcgtctgcactgtgatcgtgacaaatcttccctcctcaccagctagtctggggtttcctctccctgccccaggccagaactgccttcttcatttccacccacgctcccagcctcttagctgaaagcacaaatggtgaaatcagtagtctcgctccatctctaatagactaaacctaaatgcctctaggacggactgttgctatccaagcgtttggtgttaccttctcctgggaggtcctgctgcaactcaagttccacaggatggtcaagctgtcagacatccaagtttacatcattgtaattattactggtatttacaatttgcaagagttttgggttagtttttttttttttttttgctttgtttttgtacaaaagagtctaacattttttgccaaacagatatatatttaatgaaaagaagagatacataaatgtgtgaatttccagtttttttttaattattttaatcccaaacatcttcctgaaaataacattcccttaaacatgctgtggaataaaatggattgtgatga

SEQ ID NO: 7350 - DNA, 571 bp, Homo sapiens
gctcgcagcacgacaccgcggtgtgtgcaagcggaacgccgccctgtccttgagccttttggctgagattgggagggcagaggaagcaggaaggatcagtgaatgcttgtgaaaagacctcatttatgtttctgcggcaagagttgcctgtcagactggcaaatataatgaaagaaataagtctccttccagataatcttctcaggacaccatccgttcaattggtacaaagctggtatatccagagtcttcaggagcttcttgattttaaggacaaaagtgctgaggatgctaaagctatttatgaggaataggtccaaaacaggcaggctttattggctcattcatcttgattccttgcagagcagagcaggtgttctctagagctttacagatactgtgatacggatcagaaaccgacacaatgatgtcattcccacaatggcccagggtgtgattgaatacaaggagagctttggggtggatcctgtcaccagccagaatgttcagtactttttggatcgattctacatgagtcgcatttcaattagaatgttactcaatcagcact

SEQ ID NO: 7351 - DNA, 2483 bp, Homo sapiens
gagctcggtgattggctcagaagggaaaaggcgggtctccgtgacgacttataaaagcccaggggcaagcggtccggataacggctagcctgaggagctgctgcgacagtccactacctttttcgagagtgactcccgttgtcccaaggcttcccagagcgaacctgtgcggctgcaggcaccggcgcgtcgagtttccggcgtccggaaggaccgagctcttctcgcggatccagtgttccgtttccagcccccaatctcagagccgagccgacagagagcagggaaccggcatggccaaagccgcggcgatcggcatcgacctgggcaccacctactcctgcgtgggggtgttccaacacggcaaggtggagatcatcgccaacgaccagggcaaccgcaccacccccagctacgtggccttcacggacaccgagcggctcatcggggatgcggccaagaaccaggtggcgctgaacccgcagaacaccgtgtttgacgcgaagcggctgatcggccgcaagttcggcgacccggtggtgcagtcggacatgaagcactggcctttccaggtgatcaacgacggagacaagcccaaggtgcaggtgagctacaagggggagaccaaggcattctaccccgaggagatctcgtccatggtgctgaccaagatgaaggagatcgccgaggcgtacctgggctacccggtgaccaacgcggtgatcaccgtgccggcctacttcaacgactcgcagcgccaggccaccaaggatgcgggtgtgatcgcggggctcaacgtgctgcggatcatcaacgagcccacggccgccgccatcgcctacggcctggacagaacgggcaagggggagcgcaacgtgctcatctttgacctgggcgggggcaccttcgacgtgtccatcctgacgatcgacgacggcatcttcgaggtgaaggccacggccggggacacccacctgggtggggaggactttgacaacaggctggtgaaccacttcgtggaggagttcaagagaaaacacaagaaggacatcagccagaacaagcgagccgtgaggcggctgcgcaccgcctgcgagagggccaagaggaccctgtcgtccagcacccaggccagcctggagatcgactccctgtttgagggcatcgacttctacacgtccatcaccagggcgaggttcgaggagctgtgctccgacctgttccgaagcaccctggagcccgtggagaaggctctgcgcgacgccaagctggacaaggcccagattcacgacctggtcctggtcgggggctccacccgcatccccaaggtgcagaagctgctgcaggacttcttcaacgggcgcgacctgaacaagagcatcaaccccgacgaggctgtggcctacggggcggcggtgcaggcggccatcctgatgggggacaagtccgagaacgtgcaggacctgctgctgctggacgtggctcccctgtcgctggggctggagacggccggaggcgtgatgactgccctgatcaagcgcaactccaccatccccaccaagcagacgcagatcttcaccacctactccgacaaccaacccggggtgctgatccaggtgtacgagggcgagagggccatgacgaaagacaacaatctgttggggcgcttcgagctgagcggcatccctccggcccccaggggcgtgccccagatcgaggtgaccttcgacatcgatgccaacggcatcctgaacgtcacggccacggacaagagcaccggcaaggccaacaagatcaccatcaccaacgacaagggccgcctgagcaaggaggagatcgagcgcatggtgcaggaggcggagaagtacaaagcggaggacgaggtgcagcgcgagagggtgtcagccaagaacgccctggagtcctacgccttcaacatgaagagcgccgtggaggatgaggggctcaagggcaagatcagcgaggccgacaagaagaaggtgctggacaagtgtcaagaggtcatctcgtggctggacgccaacaccttggccgagaaggacgagtttgagcacaagaggaaggagctggagcaggtgtgtaaccccatcatcagcggactgtaccagggtgccggtggtcccgggcctgggggcttcggggctcagggtcccaagggagggtctgggtcaggccccaccattgaggaggtagattaggggcctttccaagattgctgtttttgttttggagcttcaagactttgcatttcctagtatttctgtttgtcagttctcaatttcctgtgtttgcaatgttgaaattttttggtgaagtactgaacttgctttttttccggtttctacatgcagagatgaatttatactgccatcttacgactatttcttctttttaatacacttaactcaggccattttttaagttggttacttcaaagtaaataaactttaaaattcaagtga

SEQ ID NO: 7352 - DNA, 1509 bp, Homo sapiens
gcctgtcccagtgaggacagggacacagtactcggccacaccatggggcgcccactgcacctcgtcctgctcagtgcctccctggctggcctcctgctgctcggggaaagtctgttcatccgcagggagcaggccaacaacatcctggcgagggtcacgagggccaattcctttcttgaagagatgaagaaaggacacctcgaaagagagtgcatggaagagacctgctcatacgaagaggcccgcgaggtctttgaggacagcgacaagacgaatgaattctggaataaatacaaagatggcgaccagtgtgagaccagtccttgccagaaccagggcaaatgtaaagacggcctcggggaatacacctgcacctgtttagaaggattcgaaggcaaaaactgtgaattattcacacggaagctctgcagcctggacaacggggactgtgaccagttctgccacgaggaacagaactctgtggtgtgctcctgcgcccgcgggtacaccctggctgacaacggcaaggcctgcattcccacagggccctacccctgtgggaaacagaccctggaacgcaggaagaggtcagtggcccaggccaccagcagcagcggggaggcccctgacagcatcacatggaagccatatgatgcagccgacctggaccccaccgagaaccccttcgacctgcttgacttcaaccagacgcagcctgagaggggcgacaacaacctcaccaggatcgtgggaggccaggaatgcaaggacggggagtgtccctggcaggccctgctcatcaatgaggaaaacgagggtttctgtggtggaaccattctgagcgagttctacatcctaacggcagcccactgtctctaccaagccaagagattcaaggggaccggaacacggagcaggaggagggcggtgaggcggtgcacgaggtggaggtggtcatcaagcacaaccggttcacaaaggagacctatgacttcgacatcgccgtgctccggctcaagacccccatcaccttccgcatgaacgtggcgcctgcctgcctccccgagcgtgactgggccgagtccacgctgatgacgcagaagacggggattgtgagcggcttcgggcgcacccacgagaagggccggcagtccaccaggctcaagatgctggaggtgccctacgtggaccgcaacagctgcaagctgtccagcagcttcatcatcacccagaacatgttctgtgccggctacgacaccaagcaggaggatgcctgccagggggacagcgggggcccgcacgtcacccgcttcaaggacacctacttcgtgacaggcatcgtcagctggggagagggctgtgcccgtaaggggaagtacgggatctacaccaaggtcaccgccttcctcaagtggatcgacaggtccatgaaaaccaggggcttgcccaaggccaagagccatgccccggaggtcataacgtcctctccattaaagtgagatcccactc

SEQ ID NO: 7353 - DNA, 1002 bp, Homo sapiens
tcctctgctttggactgaagcactgcaggagtttgtgaccaagaacttcaagagtcaagacagaaggaagccaagggagcagtgcaatggatttctcagtaaaggtagacatagagaaggaggtgacctgccccatctgcctggagctcctgacagaacctctgagcctagattgtggccacagcttctgccaagcctgcatcactgcaaagatcaaggagtcagtgatcatctcaagaggggaaagcagctgtcctgtgtgtcagaccagattccagcctgggaacctccgacctaatcggcatctggccaacatagttgagagagtcaaagaggtcaagatgagcccacaggaggggcagaagagagatgtctgtgagcaccatggaaaaaaactccagatcttctgtaaggaggatggaaaagtcatttgctgggtttgtgaactgtctcaggaacaccaaggtcaccaaacattccgcataaacgaggtggtcaaggaatgtcagaattatatccagatcgagagacagaagattctgaaagggttcaatgaaatgagagtcatcttggacaatgaggagcagagagagctgcaaaagctggaggaaggtgaggtgaatgtgctggataacctggcagcagctacagaccagctggtccagcagaggcaggatgccagcacgctcatctcagatctccagcggaggttgaggggatcgtcagtagagatgctgcaggatgtgattgacgtcatgaaaaggagtgaaagctggacattgaagaagccaaaatctgtttccaagaaactaaagagtgtattccgagtaccagatctgagtgggatgctgcaagttcttaaagagctgacagatgtccagtactactgggtggacgtgatgctgaatccaggcagtgccacttcgaatgttgctatttctgtggatcagagacaagtgaaaactgtacgcacctgcacatttaagaattcaaatccatgtg

SEQ ID NO: 7354 - DNA, 3411 bp, Homo sapiens
aatcacagggctgcggccgagagagaagccttattagagctttctcaacctgcagccctcatctccgccggcgagtagggccaggtgttgggagctcccacgtgggacaagatggtgtcttcggcgcagatgggcttcaacctgcaggctctcctggagcagctcagccaggatgagttgagcaagttcaagtatctgatcacgaccttctccctggcacacgagctccagaagatcccccacaaggagatggcgagcctccaggtctttgaaaagatgcaccgaatggatctgtctgagagagcaaaggatgaagtcagagaagcagctttgaaatcctttaataaaaggaagcctctatcattagggataacacggaaagaacgaccacctctagacgtggacgaaatgctggagcgcttcaaaacagaagcacaagcgtttacagaaacgaaaggaaatgtcatctgcctgggtaaagaagtctttaaaggaaaaaagccagacaaagacaataggtgcaggtatatattgaagacgaagttccgggagatgtggaagagctggcctggagatagcaaagaggtccaggttatggctgagagatacaagatgctgatcccattcagcaaccccagggtgcttcccgggcccttctcatacacggtggtgctgtatggtcctgcaggccttgggaaaaccacgctggcccagaaactaatgctagactgggcagaggacaacctcatccacaaattcaaatatgcgttctacctcagctgcagggagctcagccgcctgggcccgtgcagttttgcagagctggtcttcagggactggcctgaattgcaggatgacattccacacatcctagcccaagcacggaaaatcttgttcgtgattgacggctttgatgagctgggagccgcacctggggcgctgatcgaggacatctgcggggactgggagaagaagaagccggtgcccgtcctcctggggagtttgctgaacagggtgatgttacccaaggccgccctgctggtcaccacgcggcccagggccctgagggacctccggatcctggcggaggagccgatctacataagggtggagggcttcctggaggaggacaggagggcctatttcctgagacactttggagacgaggaccaagccatgcgtgcctttgagctaatgaggagcaacgcggccctgttccagctgggctcggcccccgcggtgtgctggatcgtgtgcacgactctgaagctgcagatggagaagggggaggacccggtccccacctgcctcacccgcacggggctgttcctgcgtttcctctgcagccggttcccgcagggcgcacagctgcggggcgcgctgcggacgctgagcctcctggccgcgcagggcctgtgggcgcagacgtccgtgcttcaccgagaggatctggaaaggctcggggtgcaggagtccgacctccgtctgttcctggacggagacatcctccgccaggacagagtctccaaaggctgctactccttcatccacctcagcttccagcagtttctcactgccctgttctacaccctggagaaggaggaggaagaggatagggacggccacacctgggacattggggacgtacagaagctgctttccggagtagaaagactcaggaaccccgacctgatccaagcaggctactactcctttggcctcgctaacgagaagagagccaaggagttggaggccacttttggctgccggatgtcaccggacatcaaacaggaattgctgcgatgcgacataagttgtaagggtggacattcaacggtgacagacctgcaggagctcctcggctgtctgtacgagtctcaggaggaggagctggtgaaggaggtgatggctcagttcaaagaaatatccctgcacttaaatgcagtagacgttgtgccatcttcattctgcgtcaagcactgtcgaaacctgcagaaaatgtcactgcaggtaataaaggagaatctcccggagaatgtcactgcgtctgaatcagacgccgaggttgagagatcccaggatgatcagcacatgcttcctttctggacggacctttgttccatatttggatcaaataaggatctgatgggtctagcaatcaatgatagctttctcagtgcctccctagtaaggatcctgtgtgaacaaatagcctctgacacctgtcatctccagagagtggtgttcaaaaacatttccccagctgatgctcatcggaacctctgcctagctcttcgaggtcacaagactgtaacgtatctgacccttcaaggcaatgaccaggatgatatgtttcccgcattgtgtgaggtcttgagacatccagaatgtaacctgcgatatctcgggttggtgtcttgttccgctaccactcagcagtgggctgatctctccttggcccttgaagtcaaccagtccctgacgtgcgtaaacctctccgacaatgagcttctggatgagggtgctaagttgctgtacacaactttgagacaccccaagtgctttctgcagaggttgtcgttggaaaactgtcaccttacagaagccaattgcaaggaccttgctgctgtgttggttgtcagccgggagctgacacacctgtgcttggccaagaaccccattgggaatacaggggtgaagtttctgtgtgagggcttgaggtaccccgagtgtaaactgcagaccttggtgctttggaactgcgacataactagcgatggctgctgcgatctcacaaagcttctccaagaaaaatcaagcctgttgtgtttggatctggggctgaatcacataggagttaagggaatgaagttcctgtgtgaggctttgaggaaaccactgtgcaacttgagatgtctgtggttgtggggatgttccatccctccgttcagttgtgaagacctctgctctgccctcagctgcaaccagagcctcgtcactctggacctgggtcagaatcccttggggtctagtggagtgaagatgctgtttgaaaccttgacatgttccagtggcaccctccggacactcaggttgaaaatcgatgactttaatgatgaactcaataagctgctggaagaaatagaagaaaaaaacccacaactgattattgatactgagaaacatcatccctgggcagaaaggccttcttctcatgacttcatgatctgaatccccccgagtcattcattctccatgaagtcatcgattttccaggtgttggtgaactgcctgtgactcctctcctccccggcccctacccctcagggataatgagttcattgctgggctagatgttttagccatgattctgcctctgttttatacctgcacacatccttatctttgtta

SEQ ID NO: 7355 - DNA, 1033 bp, Homo sapiens
cgagtgcggtgtcgctccagctcagagctcccggagccgcccggccagcgtccggcctccctgatcgtctctggccggcgccctcgccctcgcccggcgcgcaccgagcagccgcgggcgccgagcagccaccgtcccgaccaagcgccggccctgcccgcagcggcagggaaacgcaggcctggtagggggtcctgcccagtggatgtcccggcgaacatgatttcgcgaacgggagtgggggcacaggagagcgtgtccgaggtggcctggcgccccggctttgagggtgacttcctggagcggcgccgggcccggaggatctggggcgcccaagacacctgaaggctgcggcaccgcgggaacctgcggggcgcggggtgccatggtcacctgctcgccgcgtccagggcccgggctggggacccctcggtcgtgcgaggagagcgtggggaacctgtcggaaatgagatctggttgcgctgggctgcctttattttctcgttcctacagcatttgaatgaagagatgaatgatttcggaatcaagaatatggaccaggtagcccctgtggctaacagttacagagggacactcaagcgccagccagcctttgacacctttgatgggtccctgtttgctgtttttccttctctaaatgaagagcaaacactgcaagaagtgccaacaggcttggattccatttctcatgactccgccaactgtgaattgcctttgttaaccccgtgcagcaaggctgtgatgagtcaagccttaaaagctaccttcagtggcttcaaaaaggaacagcggcgcctgggcattccaaagaacccctggctgtggagtgagcaacaggtatgccagtggcttctctgggccaccaatgagttcagtctggtgaacgtgaatctgcagaggttcggcatgaatggccagatgctgtgtaaccttggcaaggaacgctttctggagctggcacctgactttgtgggtgacattctctgggaacatctggagcaaatgatcaaag

SEQ ID NO: 7356 - DNA, 582 bp, Homo sapiens
cacacatactttgatgccaactacagcaagttgcaagaccatttctctgctgaaactcctttattctgttagtttgcagaattactctcctatgatggcacagaaatcacaaggatctgacaaccttcaggaaggccaggaaaagagcaagagagagatcctgaagtgcaccaaaagcgcgtgggctccgctggatgagtggctgccccctgaccctgaggaggaaagccagagtctcaccatccccatgctggaagattccaagcaagaaagtattcagcagtggctggactctggattctttgtctctgcaaatgaaaactttcaacaagtcattgaccgcactgtttctttgtatgaacaagggatggttcaaatgactgtgaaagactacatgagatctttgcatcagttttcagaaactcccatcctatccagagggaccagtttcaactcttgctattctactgcaagtgtaccacaaagcattcctgaatggctggaattttgggagatagatccagtggagattctcttggatctggggtttggtgctgatgagccagacatctgcatgcaaat

SEQ ID NO: 7357 - DNA, 2371 bp, Homo sapiens
acctgctgggagctggaggaggcgcggagcgaagccggccctgccagccacgcggagaagcagaggcaggtgagcgcgatgcagccggcgccgggtctggggctcggggactcctccctgcaccgctacctggacggcgacttctggagcctcaagaacgagctgcgcggactcctcggcggcgcccgctcttccggcaaaggtatgatttaagcttggatgaaatgagagctttgacagttcagagagtgaagtttgccatggacctgcctctgttaaaacgtgcaggtcaggatctggcagagaaaacaaagaattttgtcagccgaagccttgtcataggagaagtcctctccatggcggacatggccacaggagtgaagtgcggaataatttattggctatttggtggtgctatcaggaatctcggaagccctgaacatgttactaagtggtttcagccactccaggagcagaaatacactgggatgtttgcaatgaccgagaggggccatgggagcaacgcgagagggatccagaccgaagccacctttgacctctctgcccaggagtttgtaattgacacgccgtgtgaaaatgcggagaagatgtatattggaaatgccatgtacgggaattatgcagctgtctttgcccagctcatcatagatggaagatctcaagggccccactgtttcatcgttcctgtccgggatgaaaacggaattgtacccaggagtcacagctattgatatgatgtacaaggagggtctgcatggtgtggacaatgggatattaatatttgacaaggttcggatacccagggagaacctgctggataagtttggttccgtggctccagatggacagtaccattcgcctattaggaacaagagtgcaagattcaatgccatgctggcagcactgaccccttcgagattagctgtggctttccaagctatgggtgccatgaagcttgggttgacgatagccattcgctatagccacagccggaggcagtttgggcccaaaaccaaggaagaggtgaagatcattgagcaccaaacacagaccctgcggctgatgccccacctggccacagccttggccctgaccttcgtcagcaggtatgctggggccctcctggatgaggatgtcttccagggaaaggagctggtcaacagtcgctcgctgcaggctctggtggcggggctgaaggcctacagcacctgggagaacatccgctgcctgcaggactgccgcgagtgcactggaggcatggttgtggggcgggaactgctggcccaatacaccaaacagtatgaagaaaaaccactctttggcctgctccaaaactgggctgaatctgtgggggacaagctgagaaccagtttcctggcatttaacatggacacagttgatgatctcgcctttctgttgaaagcagtgaaatttcgtgaaagggttcttcagcggggtttggtggccagaatttattataaggtaaagaccaagaaggaggattttttccatgcctggaactcgtgtctgcaccacgtggcttctctgtccctggcacacactcaccgagttaccttagagcagttctccctagcagtgaagagctgtcctgaccaagaggaccagactttgttaatgaagttttgtctgttgtatggaaccaagctggtgtttcaggagcgggcctggtatttagaacataaatacttgactcccatggccagcacgaggatcaggaatcagttgctggatttgtgcgactcggtgaaggatgatgcccggagggtgatctcgacctttaacattccacacacctacctccacgcaccaatcgccggaatctccaacccgcgggccgcgtgggctttctaccctgcaccgctgcagccgcggccacgggaagaggcgcgctcccggcggcccaagctgggagccaagctctaacgggtgtggcgggaagtgtggtggcccgccagcagctgccacgacgctcgctccaccgacgcccagagctgtggccgaggccgggggctggcacccgctgggccgccactctcggggattttggtggcaaagcggaggtcccgccgaggctggcgaggtgcgcggctggctgctaggaaagagatccagacggtcgcctggtgcgctggatccctgtgccctttccctgaaacccagcctggcctgactgcaacctctcccaacttcagtgccggatcccctagacaatcagggtgggctccccgctgcgagcgcgccccacagccgggtgccgccaaaggtctcctgctgttagcggtgactcacattcccagtgatttagaaaaactgtggtgccgagtgaaag

SEQ ID NO: 7358 - DNA, 696 bp, Homo sapiens
gcacagatatgcaaagcagaaaccctcgtgcaggcccgaaagagaaagcgaaccagtatcgagaaccgagtgagaggcaacctggagaatttgttcctgcagtgcccgaaacccacactgcagcagatcagccacatcgcccagcagcttgggctcgagaaggatgtggtccgagtgtggttctgtaaccggcgccagaagggcaagcgatcaagcagcgactatgcacaacgagaggattttgaggctgctgggtctcctttctcagggggaccagtgtcctttcctctggccccagggccccattttggtaccccaggctatgggagccctcacttcactgcactgtactcctcggtccctttccctgagggggaagcctttccccctgtctccgtcaccactctgggctctcccatgcattcaaactgaggtgcctgcccttctaggaatgggggacagggggaggggaggagctagggaaagaaaacctggagtttgtgccagggtttttgggattaagttcttcattcactaaggaaggaattgggaacacaaagggtgggggcaggggagtttggggcaactggttggagggaaggtgaagttcaatgatgctcttgattttaatcccacatcatgtatcacttttttcttaaataaagaagcctgggacacagtagatagacacactta

SEQ ID NO: 7359 - DNA, 5871 bp, Homo sapiens
cagccgccggcggcgctagcacctcggagtcgggcggccggagcagcggagcgcagcgcggcgcagggaacggcactgggggtggggagaccagcccggccgagccgagggccaccccctggtcctctgccctcgcgccccgctagggccaggtgcacaaaaagctttaaacaagttaaaatctaggcaacagactccctgaagtgttgactgcccaacttaatcatgactgtgattcaaaaatgttaataaataaaccaaggtgtagatcatggggaattcatatgctgggcaactgaaatctgctcgatttgaggaagctctccacaactccatagaagcctccctcagatgtagtagtgtggtaccacggccaattttttcccagctatacctggaccctgaccagcatcctttctcatctgcagatgtcaaacccaaggtggaggatctggacaaagatttggtaaaccgctacactcaaaatggaagtctggatttttctaacaatctaacagttaatgaaatggaagatgatgaagacgatgaagaaatgtctgattcaaacagcccaccaattccctattcacaaaaacctgccccagaaggatcttgcactacagatggtttttgtcaagcaggaaaggatttgcgtttggtatcactgtgtatggaacaaattgacatcccagcaggattcctcctggtgggggccaagtctcccaatctgcctgaacacatcctagtttgtgctgtggacaagcgatttctaccagatgatcatggaaaaaatgcacttttagggttttctggaaattgtatcggctgtggagaaagaggatttcgatatttcacggaattttccaaccacattaacttgaagctcaccactcagccaaagaagcagaagcacttaaagtactacctagtcagaagctcccagggtgtactgtctaaaggacctcttatctgctggaaagaatgtagaagccgacaatcctctgcttcttgccactctattaagccaagctcttcagtgtcgtcaactgtgaccccagaaaatgggacaactaatggatacaaatcaggattcactcagacagatgctgctaatggaaacagtagccatggagggaagggcagtgcatccagctccactccagcccacacagggaattactctttgtcaccacgacctagctatgcatcaggagatcaagctaccatgttcatttctgggccaccaaagaaacgacaccggggatggtatcctgggtcacctctcccccaacctggcttagttgtacctgtccctacagttcgccctctttcaagaacggagccccttttatctgccccagttccacagaccccactaactggaattttacaacccaggcccattcctgcaggggaaactgtaattgttcctgaaaacctgctgagtaactcaggagttagaccagtaattctgataggctatggcactttaccctatttctatggaaatgttggtgacattgttgtgagtcctctgctggtgaattgctacaagattccacagttggaaaacaaagatttggaaaaattagggttgaccggcagccaatttctgagcgtggaaaacatgattcttctgacgatacagtatcttgtgcggctgggtcctgatcaggtacctctcagggaagaatttgagcaaattatgctgaaagctatgcaagaatttactctgagagaaagagccctgcagataggtgctcagtgtgtccctgtgtcaccaggacaactcccctggcttgctagattaattgccagcgtatctcaagacttggttcatgtggttgtgacccagaactctttggcggagggcatttcagagaccttaaggactctcagtgaaatgagacactatcaaaggctgccagattatgtggtggtaatttgtgcatcgaaaatcagaggaaatgaattttgtgtggtagtgttaggtcagcaccagtcccgagctctggcagagagcatgctcaccacaagtgagtttttgaaagaaattagttatgagcttatcacaggaaaggtcagtttcctggcatcacatttcaaaaccacatcattaggcgatgacctagacaagctgctggaaaaaatgcaacaaagaagaggagacagtgtggttacccctttcgatggagaccttaatgaatgtgtgtcaccccaggaggctgctgctatgattcccacacaaaacctggatttagataatgaaaccttccacatttatcaaccgcagctaacagttgccagaaaactcttatcccaggtgtgtgctatagcggacagtggcagccagagcctggacctcggtcacttcagcaaagtagacttcatcatcattgttcccagatcggaggtgttggttcagcaaactcttcagcggattcgacaatcagtgtcatttcaggctctttgtcacatagcgaacccagtcatgggctagctgatagagtcattaattgcagagaagttctggaagctttcaacctcctggtgctccaggtcagctccttcccatacactctgcagacccaacagtcccgcattagctctagcaatgaggttcactggatacagctggatactggggaggacgtgggctgcgaggagaagctgtactttggcttgagtgagtacagcaagtctctgcagtgggggatcacgagcccacttctgagatgtgacgagacttttgaaaaaatggtgaacacactcttggagaggtaccccaggctgcacagcatggtcgtccgctgctatcttctcatccagcagtactctgaggccctgatggctctcaccaccatggcgtcactccgcgaccacagcacaccagaaacactcagcattatggatgacctcatcagctccccaggcaaaaacaaaagtgggaggggacacatgctcattatcagggtgccctcggtgcagctggcgatgttagccaaggagcggctacaggaggtgcgcgacaaactgggtctgcagtatcggtttgagatcatccttgggaacccggccaccgaactcagtgttgcaactcactttgtggcgcgattaaagagttggagaggaaatgaaccagaagagtggatccctcggacataccaagatttagacggtctaccttgtattgtgatattaactggcaaagatcctcttggagaaacctttcccaggtctttgaagtactgtgacctccggttaattgactcaagctatttaactcgcacggccttggagcaggaggtgggtctggcatgctgctatgtctcaaaagaggtcatccggggacccactgttgccctggacctcagcgggaaggagcaggagagagctgctgtcagtgagaatgactccgatgagctgctcatcgacctggagcggccccagagcaacagcagcgctgtcacagggacctcgggttccatcatggagaatggagtgagctcttccagcacagctgacaagtcccagaagcagtccctgacccccagctttcagagcccagccaccagcttggggctggatgaaggggtctccgccagctcagctggagccggagccggggagactctgaagcaggaatgtgactccctgggcccccagatggcgagcagcaccacctccaagccgtcatcatcatcctcaggacccaggaccctcccatggccgggacagcccatcagaggctgccggggcccacaggcagccctgccaccagtggtgatcctatccaaagcggcctacagtctcctgggctcccagaagagtggcaagctgccatcctcctcctccctgctgccccacgccgacgtggcctgggtgagctccctgcggccactcctgaacaaggacatgagcagtgaggagcagtccctctactacaggcagtggaccttggcccggcagcaccacgctgactatagcaaccagctggacccggcctctggcacccgaaacttccacccccgacggctcctgctgacagggcccccacaggtgggaaagacgggctcctatttacagttcctcaggatcctcttccgcatgctcatcaggctcctggaggtggacgtgtatgatgaggaggagatcaacaccgatcacaatgaaagcagtgaagtgagccagtcagagggagagccctggcctgacatcgagagcttcagtaaaatgccttttgatgtcagtgtgcatgaccccaagtacagtttgatgagcctggtgtatactgagaagctggcaggggtcaaacaagaagtgataaaggaatccaaagttgaagagcccaggaaacgggaaactgtatccataatgctgaccaaatatgcagcctataacacctttcaccactgtgaacagtgccgccagtacatggacttcacctctgcctcccagatgtctgactccacccttcatgccttcacattctcttcttctatgctgggagaagaggttcagctctatttcatcattcccaaatccaaagagagtcattttgtcttcagcaagcagggcaagcacctggagagcatgcggctgcccctggtttcagacaagaatttgaatgcagtcaagagccctattttcactccttccagtggtcgacatgagcacggactcctaaaccttttccacgccatggagggcatcagccaccttcacctcctggtggtcaaagagtatgagatgcctctgtaccgcaagtactggcccaaccacatcatgctggtgcttcccggcatgttcaataatgcaggcgtgggtgctgccaggttcctcatcaaggagctatcatatcacaacctagaattggagagaaaccgcctggaggagctaggcattaaacgccagtgtgtctggcctttcatcgtcatgatggatgactcatgtgtcctatggaacattcacagtgttcaggagccatccagccagcccatggaagtaggagtttccagtaagaatgtgtccttgaagactgtcttgcagcacattgaagccacaccaaaaattgtccactatgcaatcttgggcatacagaaatggagcagcaagctgacttctcagagcctaaaggccccattctctaggtgtcacgtgcatgatttcattctcctcaacacagacttgactcagaatgtgcagtatgacttcaacaggtatttctgtgaagatgctgactttaatctgagaacaaacagtagtggcctgctcatctgccgctttaataacttcagtctcatgaagaaacatgttcaggttggagggcaaagggactttatcattaaaccaaagatcatggtgtcagagagcttagcacccatcttgccccttcaatacatctgtgctcccgacagtgaacacacactactggcagcccctgcacagtttctcctggagaaattccttcagcacgcctcatataaactcttccccaaagccatccataacttcaggagtcctgtgctggccattgactgctaccttaacattggaccagaggtggccatatgctatatcagctccagaccccactccagcaatgtcaactgtgaaggggtgtttttcagtggactccttttgtacctctgtgactcttttgtaggtgctgatcttaagaaatttaaatttctaaaaggtgctacactgtgtgtcatctgccaagacagaagttccttgcgccaaacaattgtccgcttagagctagaagatgagtggcagttccgcctccgggacgagtttcaaactgctaacagcagtgatgacaagcctctctactttcttactggacgtcatgtatgagcttttgaa

SEQ ID NO: 7360 - DNA, 1124 bp, Homo sapiens; identical to SEQ ID NO: 6440

SEQ ID NO: 7361 - DNA, 761 bp, Homo sapiens; identical to SEQ ID NO: 6637

SEQ ID NO: 7362 - DNA, 701 bp, Homo sapiens
atgattattatagaaatacagaaaacaaccacctgcccatcatgggatggtcacctgacattcttggtggctcgacagctccagccctccgtggtgtggattgaagacacagaaaaaaccttctacaaaaaagttcccaacgcagaaaagatgaatgaacctaaacgcctgaaaaaacaccttccccaaatcctgaaactcctgaaaccagatgaccggattctgattgtggggaccacacggcgtcccttcgatgctgaactccaatctttctgcaaagtttaccagaaaattattttggtgcccagaccagactatgcttccagatacgttctgtggaagcaaatcattgaacgcaatggaggagtcctcaccagtgccttgaatgtcagctgcctggcgaaggtcactgacggcttcacccaaggacatatagtcgaagtggttaaaggcgtgctcacagatcagagaatccggcggcaaattcataaacctctcactgcagttgagtttattacggcgataaccagcatgaatccagtgtacaaagaggaagaagagagctttaagaactggtatgccaaaactcctctgggtaaaaaacgtgccttggcgataacaggaggcagcacagaaaaggcaaaggacaaagggaaaaggaaataaaagaaagagaaaaaggcaaaaaagaaaaagtaatg

SEQ ID NO: 7363 - DNA, 1837 bp, Homo sapiens
cccaggaccctggtgggagagtgtgtgcgtcgcgctggagggcgggaggcgggggcgggaggtgccggtcgagggagccccgctctcagagctccaggggaggagcgaggggagcgcggagcccggcgcctacagctcgccatggtgcgccccctgaacccgcgaccgctgccgcccgtagtcctgatgttgctgctgctgctgccgccgtcgccgctgcctctcgcagccggagacccccttcccacagaaagccgactcatgaacagctgtctccaggccaggaggaagtgccaggctgatcccacctgcagtgctgcctaccaccacctggattcctgcacctctagcataagcaccccactgccctcagaggagccttcggtccctgctgactgcctggaggcagcacagcaactcaggaacagctctctgataggctgcatgtgccaccggcgcatgaagaaccaggttgcctgcttggacatctattggaccgttcaccgtgcccgcagccttgactcagacctctgcctcaagtttgccatgctgtgtactctcaatgacaagtgtgaccggctgcgcaaggcctacggggaggcgtgctccgggccccactgccagcgccacgtctgcctcaggcagctgctcactttcttcgagaaggccgccgagccccacgcgcagggcctgctactgtgcccatgtgcccccaacgaccggggctgcggggagcgccggcgcaacaccatcgcccccaactgcgcgctgccgcctgtggcccccaactgcctggagctgcggcgcctctgcttctccgacccgctttgcagatcacgcctggtggatttccagacccactgccatcccatggacatcctaggaacttgtgcaacagagcagtccagatgtctacgagcatacctggggctgattgggactgccatgacccccaactttgtcagcaatgtcaacaccagtgttgccttaagctgcacctgccgaggcagtggcaacctgcaggaggagtgtgaaatgctggaagggttcttctcccacaacccctgcctcacggaggccattgcagctaagatgcgttttcacagccaactcttctcccaggactggccacaccctacctttgctgtgatggcacaccagaatgaaaaccctgctgtgaggccacagccctgggtgccctctcttttctcctgcacgcttcccttgattctgctcctgagcctatggtagctggacttccccagggccctcttcccctccaccacacccaggtggacttgcagcccacaaggggtgaggaaaggacagcagcaggaaggaggtgcagtgcgcagatgagggcacaggagaagctaagggttatgacctccagatccttactggtccagtcctcattccctccaccccatctccacttctgattcatgctgcccctccttggtggccacaatttagccatgtcatctggtggtgaccagctccaccaagcccctttctgagcccttcctcttgactaccaggatcaccagaatctaataagttagccattctctattgcattccagattagggttagggtagggaggactgggtgttctgaggcagcctagaaagtcattctcctttgtgaagaaggctcctgccccctcgtctcctcctctgagtggaggatggaaaactactgcctgcactgccctgtccccggatcctgccgaacatctgggcatcaggagctggagcctgtgggccttgctttattcctattattgtcctaaagtctctctgggctcttggatcatgattaaacctttgactt

SEQ ID NO: 7364 - DNA, 2422 bp, Homo sapiens
cccgcccacttccaactaccgcctccggcctgcccagggagagagagggagtggagcccagggagagggagcgcgagagagggagggaggaggggacggtgctttggctgacttttttttaaaagagggtgggggtggggggtgattgctggtcgtttgttgtggctgttaaattttaaactgccatgcactcggcttccagtatgctgggagcggtgaagatggaagggcacgagccgtccgactggagcagctactatgcagagcccgagggctactcctccgtgagcaacatgaacgccggcctggggatgaacggcatgaacacgtacatgagcatgtcggcggccgccatgggcagcggctcgggcaacatgagcgcgggctccatgaacatgtcgtcgtacgtgggcgctggcatgagcccgtccctggcggggatgtcccccggcgcgggcgccatggcgggcatgggcggctcggccggggcggccggcgtggcgggcatggggccgcacttgagtcccagcctgagcccgctcggggggcaggcggccggggccatgggcggcctggccccctacgccaacatgaactccatgagccccatgtacgggcaggcgggcctgagccgcgcccgcgaccccaagacctacaggcgcagctacacgcacgcaaagccgccctactcgtacatctcgctcatcaccatggccatccagcagagccccaacaagatgctgacgctgagcgagatctaccagtggatcatggacctcttccccttctaccggcagaaccagcagcgctggcagaactccatccgccactcgctctccttcaacgactgtttcctgaaggtgccccgctcgcccgacaagcccggcaagggctccttctggaccctgcaccctgactcgggcaacatgttcgagaacggctgctacctgcgccgccagaagcgcttcaagtgcgagaagcagctggcgctgaaggaggccgcaggcgccgccggcagcggcaagaaggcggccgccggagcccaggcctcacaggctcaactcggggaggccgccgggccggcctccgagactccggcgggcaccgagtcgcctcactcgagcgcctccccgtgccaggagcacaagcgagggggcctgggagagctgaaggggacgccggctgcggcgctgagccccccagagccggcgccctctcccgggcagcagcagcaggccgcggcccacctgctgggcccgccccaccacccgggcctgccgcctgaggcccacctgaagccggaacaccactacgccttcaaccacccgttctccatcaacaacctcatgtcctcggagcagcagcaccaccacagccaccaccaccaccaaccccacaaaatggacctcaaggcctacgaacaggtgatgcactaccccggctacggttcccccatgcctggcagcttggccatgggcccggtcacgaacaaaacgggcctggacgcctcgcccctggccgcagatacctcctactaccagggggtgtactcccggcccattatgaactcctcttaagaagacgacggcttcaggcccggctaactctggcaccccggatcgaggacaagtgagagagcaagtgggggtcgagactttggggagacggtgttgcagagacgcaagggagaagaaatccataacacccccaccccaacacccccaagacagcagtcttcttcacccgctgcagccgttccgtcccaaacagagggccacacagataccccacgttctatataaggaggaaaacgggaaagaatataaagttaaaaaaaagcctccggtttccactactgtgtagactcctgcttcttcaagcacctgcagattctgatttttttgttgttgttgttctcctccattgctgttgttgcagggaagtcttacttaaaaaaaaaaaaaaattttgtgagtgactcggtgtaaaaccatgtagttttaacagaaccagagggttgtactattgtttaaaaacaggaaaaaaaataatgtaagggtctgttgtaaatgaccaagaaaaagaaaaaaaaagcattcccaatcttgacacggtgaaatccaggtctcgggtccgattaatttatggtttctgcgtgctttatttatggcttataaatgtgtattctggctgcaagggccagagttccacaaatctatattaaagtgttatacccggttttatcccttgaatcttttcttccagatttttcttttctttacttggcttacaaaatatacaggcttggaaattatttcaagaaggagggagggataccctgtctggttgcaggttgtattttattttggcccagggagtgttgctgttttcccaacattttattaataaaattttcagacat

SEQ ID NO: 7365 - DNA, 709 bp, Homo sapiens; identical to SEQ ID NO: 6531

SEQ ID NO: 7366 - DNA, 540 bp, Homo sapiens
aaagtgccagaagtgccaaagaaacctgtcttggaagagaaaccagctgttcctgttccagaaagagcggagtctcctcccccagaagtatatgaagaacctgaggaaattgctcctgaagaggaaattgctcctgaagaggaaaagccagttcctgttgcagaagaggaggaaccagaggttccacctccagcagtgcctgaagagcccaagaagatcatcccagagaagaaagttcctgtcatcaaaaaaccagaagcaccgcctcctaaagaacctgaacctgaaaaggttattgagaagccaaaactcaaaccaagacccccacctcctccacctgctccacctaaggaagatgtgaaggagaaaatattccaacttaaagctattccaaagaagaaagttcctgaaaaacctcaggttccagaaaaagtggagcttacacctctgaaagtgcctggaggtgaaaagaaagttcgcaaattacttccggaacgtaaacctgaaccaaaggaagaagttgttctgaaaagcggtata

SEQ ID NO: 7367 - DNA, 1032 bp, Homo sapiens
ccccgggttgagcgggaggcgcgatcggtccggtcggtggctccccgcggcggggccgggcccgatctcgggcgggaaccgagcgcagagccggtactgggggaggggagagggggcgggattcccgccgggagggatccggcgtagcagggggcggagtcttattccaaccccgcttcgctttccgcatgtcccgctttgcgctcccggccctgggcatcccgctgtttccctctgcgtccgcggccctgcccttttcgggggcacagctgtggtctttccaccccgcgagacagcggggcgagggggcgcgggcggccagtggatagaggctgatgcccccaagcacggacgccagcgtgggggtggaggttcttccagctgccctgagcctgtgcgaagcgggaggtccttccccagttcccacagactgtggggagggaagagacggtggaagcgagcgggttctgggctcctgggtctctggaactaccctctgcccttgccccaacactcaggtagcgggaaggatgaccacgctcacacgacaagacctcaactttggccaagtggtggccgatgtgctctgcgagttcctggaggtggctgtgcatctcatcctctacgtgcgcgaggtctaccccgtgggcatcttccagaaacgcaagaagtacaacgtgccggtccagatgtcctgccacccggagctgaatcagtatatccaggacacgctgcactgcgtcaagccactcctggagaagaatgatgtggagaaagtggtggtggtgattttggataaagagcaccgcccagtggagaaattcgtctttgagatcacccagcctccactgctgtccatcagctcagactcgctgttgtctcatgtggagcagctgctccgggccttcatcctgaagatcagcgtgtgcgatgccgtcctggaccacaaccccccaggctgtaccttcacagtcctggtgcacacgagagaagccgccactcgcaacatggagaagatccaggtcatcaagg

SEQ ID NO: 7368 - DNA, 1285 bp, Homo sapiens
gttgttcctgaaaagaaggtgcctctggtggttcccaaaaagccagaagccccacctgctaaagtgcctgaagttccaaaagaagttgttccagaaaagaaagtagctgttcccaaaaagccagaagtcccaccagcaaaagtgccagaagtgccaaagaaacctgtcttggaagagaaaccagctgttcctgttccagaaagagcggagtctcctcccccagaagtatatgaagaacctgaggaaattgctcctgaagaggaaattgctcctgaagaggaaaagccagttcctgttgcagaagaggaggaaccagaggttccacctccagcagtgcctgaagagcccaagaagatcatcccagagaagaaagttcctgtcatcaaaaaaccagaagcaccgcctcctaaagaacctgagatgccaaagaaagttgttccagtgaagaaggtcccaactgttaagaagccagaaacaccagcagctaaagtgcctgaggtgcccaagaaacttgttccagtaaagaaagaacctgtgcctgttaccaaaaaaccagaagttcttccagaaaaagtgcccaaagtgcctgagaaaatcatcccagaaaaggaagtgtctgtgcctatccctgcagagccagaagttccacctgctgaagttgaagagactcctgaggaaataatatatgaagaaaaagcatctataaccattggtagaaaagagactccccctgttgaagaacgtgaaattgaaaagtatattaaacctgaagagcccgaacctgaaccacagcctgaagaaataccagtaaaagaacctgaacctgaaaaggttattgagaagccaaaactcaaaccaagacccccacctcctccacctgctccacctaaggaagatgtgaaggagaaaatattccaacttaaagctattccaaagaagaaagttcctgaaaaacctcaggttccagaaaaagtggagcttacacctctgaaagtaccagaaccaccacctccaaaacctgttgaagaggttgaagtacctactgttacaaaaagggaaaggaagattcctgaaccaacaaaagtgcctgaaatcaagccagcaatacctctccctgcacctgaaccgaaaccaaagcccgaagcagaagtgaaaacaatcaaaccacctcctgtggaacctgaaccaacccccatcgctgccccagtaacagtgccagtggttggaaagaaagcaggtgtacccaaaaagactccttcaccaatagaagccgaaaggagaaagt

SEQ ID NO: 7369 - DNA, 2530 bp, Homo sapiens
aagaaaaacagctgagagggcatcaggaaggagtttcgacccgcgctggcgagtcatgagcgccaagtttcccactggcgcgcaaacttgagttacttttgagcgtggatactggcgaagaggctgcgggcggtattagcgtttgcagcgacttggctcgggcagctgacccaagtgtcctgtcttccttcctctgcttgtctctaggctctgaaactgcggagcggccaccggacgccttctggagcaggtagcagcatgcagccgcctccaagtctgtgcggacgcgccctggttgcgctggttcttgcctgcggcctgtcgcggatctggggagaggagagaggcttcccgcctgacagggccactccgcttttgcaaaccgcagagataatgacgccacccactaagaccttatggcccaagggttccaacgccagtctggcgcggtcgttggcacctgcggaggtgcctaaaggagacaggacggcaggatctccgccacgcaccatctcccctcccccgtgccaaggacccatcgagatcaaggagactttcaaatacatcaacacggttgtgtcctgccttgtgttcgtgctggggatcatcgggaactccacacttctgagaattatctacaagaacaagtgcatgcgaaacggtcccaatatcttgatcgccagcttggctctgggagacctgctgcacatcgtcattgacatccctatcaatgtctacaagctgctggcagaggactggccatttggagctgagatgtgtaagctggtgcctttcatacagaaagcctctgtgggaatcactgtgctgagtctatgtgctctgagtattgacagatatcgagctgttgcttcttggagtagaattaaaggaattggggttccaaaatggacagcagtagaaattgttttgatttgggtggtctctgtggttctggctgtccctgaagccataggttttgatataattacgatggactacaaaggaagttatctgcgaatctgcttgcttcatcccgttcagaagacagctttcatgcagttttacaagacagcaaaagattggtggctattcagtttctatttctgcttgccattggccatcactgcatttttttatacactaatgacctgtgaaatgttgagaaagaaaagtggcatgcagattgctttaaatgatcacctaaagcagagacgggaagtggccaaaaccgtcttttgcctggtccttgtctttgccctctgctggcttccccttcacctcagcaggattctgaagctcactctttataatcagaatgatcccaatagatgtgaacttttgagctttctgttggtattggactatattggtatcaacatggcttcactgaattcctgcattaacccaattgctctgtatttggtgagcaaaagattcaaaaactgctttaaggctgggccacatgttggaaataagctagtaatgttgttttctgtcaatattgaatgtgatggtacagtaaaccaaaacccaacaatgtggccagaaagaaagagcaataataattaattcacacaccatatggattctatttataaatcacccacaaacttgttctttaatttcatcccaatcactttttcagaggcctgttatcatagaagtcattttagactctcaattttaaattaattttgaatcactaatattttcacagtttattaatatatttaatttctatttaaattttagattatttttattaccatgtactgaatttttacatcctgataccttttccttctccatgtcagtatcatgttctctaattatcttgccaaattttgaaactacacacaaaaagcatacttgcattatttataataaaattgcattcagtggctttttaaaaaaatgtttgattcaaaactttaacatactgataagtaagaaacaattataatttctttacatactcaaaaccaagatagaaaaaggtgctatcgttcaacttcaaaacatgtttcctagtattaaggactttaatatagcaacagacaaaattattgttaacatggatgttacagctcaaaagatttataaaagattttaacctattttctcccttattatccactgctaatgtggatgtatgttcaaacaccttttagtattgatagcttacatatggccaaaggaatacagtttatagcaaaacatgggtatgctgtagctaactttataaaagtgtaatataacaatgtaaaaaattatatatctgggaggattttttggttgcctaaagtggctatagttactgattttttattatgtaagcaaaaccaataaaaatttaagtttttttaacaactaccttatttttcactgtacagacactaattcattaaatactaattgattgtttaaaagaaatataaatgtgacaagtggacattatttatgttaaatatacaattatcaagcaagtatgaagttattcaattaaaatgccacatttctggtctctggg

SEQ ID NO: 7370 - DNA, 2979 bp, Homo sapiens
gcttccttagcttcctgtgaaggaaattcttcaaacaaacaagtatcttcggaaagtcaaatgggttttttttctctaagcagtgagagaaatgaatctgttatccattatcctgaatccacagaacctgaaatacagcaagaaatgtccacgtcacaaccagactgcaatgtggatagttgctcagtaagcagtggatatggcaccttttgtatctcagaattaaatctgtacaaatctaaagaccctaaggagttcatggagcacatagatgttcccaaaggacagtatgtagcacctgcggtgccggctgagtcacttgtagatggtgtgaaaaatgagaatttttatatacagactcctgaagagtgtcatgtgtctttaaaggaagatgtatccatttctcctggtgaatttgaacataattttcttggtgaaaataaggtttctgaagtatacagtgggaaaacaaatagtaatgctataacatcatgggcacaaaaactgaagcagaaccaaccaaagagagcacatgtagaagatggaggttcaagatctaaacaaggaaatgagcaaatctgattttgctgctgctacacatcctcgtgctttttacctcagtaaaccagatgaaactccaaatgcttggatgtctgattcaggaacaggattgacttactggaaactagaggaaaaggatatgcaccactctttgcctgaaactttagagaagacgttcatatcattgtcttccacagatgtgtcaccaaaccagtctaatactagtaatgagatgaagctaccgtcactgaaggatatttattataaaaaacaaagggaaaacaagcagttacctgagaggaatctcacttctgcttccaacccaaatcatccaccagaggtaaagttgtccacattctgccgagtgaacgtgaacaatgcttcctgactctaacttttacctcaagcttcattttccctaggagatctaaagcctactcacttcaaaacaagcaaaacaaagccgagttctgagggattaggcagaatctgaaggaaaagcatgctcgacacatagcagatcttcgagcttattatgaatcagaaataaatagtttgaaacagaagctggaggcaaaagaaatctctggagttgaagattggaagataaccaatcaaattcttgtagacagatgtggccaattagatagtgctttgcatgaagctactagtcgcgtgagaacacttgaaaataagaataacttactggaaattgaagtgaatgatttgagagaacgcttcagtgcagccagcagtgcttccaaaattttgcaggaacgaattgaagaaatgagaacaagcagtaaagaaaaagacaataccatcattcgactaaaatctagactgcaagatttagaagaagcatttgagaatgcttacaaactctcagatgataaagaagctcaactaaaacaagagaacaaaatgtttcaagatcttttaggagagtatgagtcccttggaaaagaacacaggagagtaaaggatgcattaaatacaactgagaacaaattgcttgatgcatatactcagatttctgatttgaaaagaatgatttcaaaacttgaagctcaggtcaagcaagtagaacatgaaaatatgttaagccttcgtcataattctagaattcacgtgagaccctcgcgtgccaacacactagcaacttcagacgtcagcaggcggaaatggctgattccaggtgcagagtattccatctttactggccagcctctggacacccaggacagtaacgtggataaccagctggaggaaacctgtagcctagggcaccgttcacctctggaaaaggattcttcacctggaagttcatcaacaagcttgttgataaaaaagcaaagagagacttcagacacgccgatcatgagagctttaaaagaacttgatgagggaaaaatatttaaaaattgggggacacagacagagaaagaggacacctcaaatataaatcctcggcaaactgaaacttcagttaatgcaagtcgttctccagaaaagtgtgcccaacagagacaaaagagacttaattcggcctcacagagatcatcatctttaccaccttcaaatcgtaaatcaagtactccaacaaaaagagagattatgctaacaccagtgactgtggcttatagtccaaagcgatcccctaaagaaaacttgtccccaggatttagtcatctgcttagcaaaaatgagagcagtccaattcgatttgatatacttttggatgatttagatactgttcctgtgtctacattacaacgtaccaatccaagaaagcaactccagtttcttcctctagatgactcggaagaaaaaacttattctgagaaagccaccgataaccatgttaatcatagctcttgccctgaaccggtgccaaatggagtgaagaaagtatctgtgagaacagcctgggagaagaataaatcagttagctacgaacagtgtaagccggtttcagtcactccacaggggaatgattttgaatatacagcaaaaattcggaccctagctgaaacagaacgattttttgatgaacttacaaaagaaaaggaccagattgaggcagcactaagcaggatgccttctcctggaggacgaatcactttacagacaagattaaatcaggaagccttggaagatcgtttggaaaggattaatcgagaactgggttcagttcgcatgacgctaaagaaattccatgttttgcgcacctctgcaaatctttgagatttgtagccattaaattttgagacatttttgtttgcactaatgtataattatgcagtcagaaaaggcaaactattttgtactgtttataagccttcaaacagtagttttacaatcatgctattcttacacttgctattttatacttcaaatggccacatattttcaaga

SEQ ID NO: 7371 - DNA, 2910 bp, Homo sapiens
gaatacccggctagggacacgagagagaggaatcggggtttctgggtgacggtgatctcggggtgggcaggactccaaaggcccgtcgacccggtggtggactccttgcactgggattggacatatgcaagcgggagatttggggccggcgctcaaaatcggggggcgggggtggactcgggtttggaccccaggatccgatcagcggacccttgattcaacgtgaggtcccgaattgacgtccttccctcaaaacctccgggtctacaaaccaggaccctcaagacccttcaggtgcttagagaaggatgagctaggttatgtagtcctgggtcggcgcaaaaaggcagctgaaagcggctccagcgtgacatggctgaagcgcaccaggccgtgggcttccgaccctcgctgacctcggacggggctgaagtggaactcagtgcccctgtgctgcaggagatctacctctctggcctgcgctcctggaaaaggcatctctcacgtttctggaatgactttctcaccggtgtgtttcctgccagccccctcagttggcttttcctcttcagtgccatccagcttgcctggttcctccagctggatccttccttaggactgatggagaagatcaaagagttgctgcctgactggggtggacaacaccacgggctccggggggtcctggcagccgcgctgtttgcctcgtgtttgtggggagccctgatcttcacactgcacgtggccctgaggctgcttctgtcctaccacggctggcttcttgagccccacggagccatgtcctcccccaccaagacctggctggccctggtccgcatcttctctggccgccacccgatgctgttcagttaccagcgctccctgccacgccagcccgtgccctctgtgcaggacaccgtgcgcaagtacctggagtcggtccggcccatcctctccgacgaggacttcgactggaccgcggtcctggcgcaggaattcctgaggctgcaggcgtcgctgctgcagtggtacctgcggctcaagtcctggtgggcgtccaattatgtcagtgactggtgggaggaatttgtgtacctgcgctcccgaaatccgctgatggtgaacagcaactattacatgatggacttcctgtatgtcacacccacgcctctgcaggcagctcgcgctgggaatgccgtccatgccctcctcctgtaccgccaccgcctgaaccgccaggagatacccccgactttgctgatgggaatgcgccccttatgctctgcccagtacgagaagatcttcaacaccacgcggattccaggggtccaaaaagactacatccgccacctccatgacagccaacacgtggctgtcttccaccggggccgattcttccgcatggggacccactcccgaaacagcctgctttccccgagagccctggagcagcagtttcagagaatcctggatgatccctcaccggcctgcccccacgaggaacatctggcagctctgacagctgctcccaggggcacgtgggcccaggtgcggacatccctgaagacccaggcagcggaggccctggaggcggtggaaggggccgctttctttgtgtcactggatgctgagcccgcggggctcaccagggaggacccggcagcgtcgttggatgcctacgcccatgctctgctggccggccggggccatgatcgctggtttgacaaatccttcaccctaatcgtcttctctaacgggaagctgggcctcagcgtggagcactcctgggccgactgccccatctcaggacacatgtgggagttcactctggctacagaatgctttcagctgggctactcaacagacggccactgcaaggggcacccggaccccacactaccccagccccagcggctgcaatgggaccttccagaccagatccactcctccatctctctagccctgaggggagccaagatcttgtctgaaaatgtcgactgccatgtcgttccattctccctatttggcaagagcttcatccgacgctgccacctctcttcagacagcttcatccagatcgccttgcaactggcccacttccgggacaggggtcaattctgcctgacttatgagtcggccatgactcgcttattcctggaaggccggacggagacggtgcggtcttgcacgagggaggcctgcaactttgtcagggccatggaggacaaagagaagacggacccacagtgcctcgccctgttccgcgtggcagtggacaagcaccaggctctgctgaaggcagccatgagcgggcagggagttgaccgccacctgtttgcgctgtacatcgtgtcccgattcctccacctgcagtcgcccttcctgacccaggtccattcggagcagtggcagctgtccaccagccagatccctgttcagcaaatgcatctgtttgacgtccacaattacccggactatgtttcctcaggcggtggattcgggcctgctgatgaccatggttatggtgtttcttatatcttcatgggggatggcatgatcaccttccacatctccagcaaaaaatcaagcacaaaaacggattcccacaggctggggcagcacattgaggacgcactgctggatgtggcctccctgttccaggcgggacagcattttaagcgccggttcagagggtcagggaaggagaactccaggcacaggtgtggatttctctcccgccagactggggcctccaaggcctcaatgacatccaccgacttctgactccttccagcaggcagctggcctctccaaggaataagggtgaaattgccacagctggctgacacaggacaggggcaactggtttggcaaccccacatccaggccaataaagatgtgtgagctggg

SEQ ID NO: 7372 - DNA, 531 bp, Homo sapiens
atccaggtgagactgggagagcacaatatcgaagtcctggaggggaatgagcagttcatcaatgcagccaagatcatccgccaccccaaatacaacaggattattctgaacaatgacatcatgctgatcaagctctccacacctgccgtcatcaatgcccatgagtgccttatctccggctggggcaataccctgagctctggggccgactacccagatgagctgcagtgcctggacgctcctgtgctgacccaggctaagtgtaaagcctcctaccctttaaagattaccagcaacatgttctgtgtgggcttccttgagggaggcaaggattcctgccagggtgactctggtggccctgtggtctgcaatggacagcttcaaggaattgtctcctggggctatggctgtgcccagaagagaaggcctggagtctacaccaaggtctacaactatgtggactggattaaggacaccatagctgccaacagctaaagcccctggtcactctgcagtctctataccaataaa

SEQ ID NO: 7373 - DNA, 580 bp, Homo sapiens
aagctccgccccctcgcggttaccctggatacccgtcaggctcgggctgcagagaaggaggatcagggcaagtggcttcagagatgcagccctcactgcttaacgtcctagttattgtccttgaaacccgagccatctcaccgctcgcccccaaccctgggctctggctgtttaaaagctggagaggaagtgaaagcgtcaagtacagttgatagaagtccagatcctgaggaaatctccagctaaatgctcaaaatataaaatactgagctgagatttgcgaagagcagcagcatggatggattttatgaccagcaagtgccttacatggtcaccaatagtcagcgtgggagaaattgtaacgagaaaccaacaaatgtcaggaaaagaaaattcattaacagagatctggctcatgattcagaagaactctttcaagatctaagtcaattacaggaaacatggcttgcagaagctcaggtacctgacaatgatgagcagtttgtaccagactatcaggctgaaagtttggcttttcatggcctgccactgaaaatcaagaaagaaccccacagtccat

SEQ ID NO: 7374 - DNA, 3068 bp, Homo sapiens; identical to SEQ ID NO: 2045

SEQ ID NO: 7375 - DNA, 3071 bp, Homo sapiens
ttcggggactaactgcaacggagagactcaagatgattccctttttacccatgttttctctactattgctgcttattgttaaccctataaacgccaacaatcattatgacaagatcttggctcatagtcgtatcaggggtcgggaccaaggcccaaatgtctgtgcccttcaacagattttgggcaccaaaaagaaatacttcagcacttgtaagaactggtataaaaagtccatctgtggacagaaaacgactgtgttatatgaatgttgccctggttatatgagaatggaaggaatgaaaggctgcccagcagttttgcccattgaccatgtttatggcactctgggcatcgtgggagccaccacaacgcagcgctattctgacgcctcaaaactgagggaggagatcgagggaaagggatccttcacttactttgcaccgagtaatgaggcttgggacaacttggattctgatatccgtagaggtttggagagcaacgtgaatgttgaattactgaatgctttacatagtcacatgattaataagagaatgttgaccaaggacttaaaaaatggcatgattattccttcaatgtataacaatttggggcttttcattaaccattatcctaatggggttgtcactgttaattgtgctcgaatcatccatgggaaccagattgcaacaaatggtgttgtccatgtcattgaccgtgtgcttacacaaattggtacctcaattcaagacttcattgaagcagaagatgacctttcatcttttagagcagctgccatcacatcggacatattggaggcccttggaagagacggtcacttcacactctttgctcccaccaatgaggcttttgagaaacttccacgaggtgtcctagaaaggatcatgggagacaaagtggcttccgaagctcttatgaagtaccacatcttaaatactctccagtgttctgagtctattatgggaggagcagtctttgagacgctggaaggaaatacaattgagataggatgtgacggtgacagtataacagtaaatggaatcaaaatggtgaacaaaaaggatattgtgacaaataatggtgtgatccatttgattgatcaggtcctaattcctgattctgccaaacaagttattgagctggctggaaaacagcaaaccaccttcacggatcttgtggcccaattaggcttggcatctgctctgaggccagatggagaatacactttgctggcacctgtgaataatgcattttctgatgatactctcagcatggatcagcgcctccttaaattaattctgcagaatcacatattgaaagtaaaagttggccttaatgagctttacaacgggcaaatactggaaaccatcggaggcaaacagctcagagtcttcgtatatcgtacagctgtctgcattgaaaattcatgcatggagaaagggagtaagcaagggagaaacggtgcgattcacatattccgcgagatcatcaagccagcagagaaatccctccatgaaaagttaaaacaagataagcgctttagcaccttcctcagcctacttgaagctgcagacttgaaagagctcctgacacaacctggagactggacattatttgtgccaaccaatgatgcttttaagggaatgactagtgaagaaaaagaaattctgatacgggacaaaaatgctcttcaaaacatcattctttatcacctgacaccaggagttttcattggaaaaggatttgaacctggtgttactaacattttaaagaccacacaaggaagcaaaatctttctgaaagaagtaaatgatacacttctggtgaatgaattgaaatcaaaagaatctgacatcatgacaacaaatggtgtaattcatgttgtagataaactcctctatccagcagacacacctgttggaaatgatcaactgctggaaatacttaataaattaatcaaatacatccaaattaagtttgttcgtggtagcaccttcaaagaaatccccgtgactgtctataagccaattattaaaaaatacaccaaaatcattgatggagtgcctgtggaaataactgaaaaagagacacgagaagaacgaatcattacaggtcctgaaataaaatacactaggatttctactggaggtggagaaacagaagaaactctgaagaaattgttacaagaagaggtcaccaaggtcaccaaattcattgaaggtggtgatggtcatttatttgaagatgaagaaattaaaagactgcttcagggagacacacccgtgaggaagttgcaagccaacaaaaaagttcaaggatctagaagacgattaagggaaggtcgttctcagtgaaaatccaaaaaccagaaaaaaatgtttatacaaccctaagtcaataacctgaccttagaaaattgtgagagccaagttgacttcaggaactgaaacatcagcacaaagaagcaatcatcaaataattctgaacacaaatttaatatttttttttctgaatgagaaacatgagggaaattgtggagttagcctcctgtggtaaaggaattgaagaaaatataacaccttacaccctttttcatcttgacattaaaagttctggctaactttggaatccattagagaaaaatccttgtcaccagattcattacaattcaaatcgaagagttgtgaactgttatcccattgaaaagaccgagccttgtatgtatgttatggatacataaaatgcacgcaagccattatctctccatgggaagctaagttataaaaataggtgcttggtgtacaaaactttttatatcaaaaggctttgcacatttctatatgagtgggtttactggtaaattatgttattttttacaactaattttgtactctcagaatgtttgtcatatgcttcttgcaatgcatattttttaatctcaaacgtttcaataaaaccatttttcagatataaagagaattacttcaaattgagtaattcagaaaaactcaagatttaagttaaaaagtggtttggacttgggaacaggactt

SEQ ID NO: 7376 - DNA, 1980 bp, Homo sapiens
tccccgggagaccctgtgcccctaaatcgcggtccactgcgcgcgtcaggtttctagaagcagggtagaacagagggcagacacctagcccaggctggtgttgttactaaacaatggcagctggtgagccaagggtgaccagggccctgaactctgtggcccagctttgagggaagcaaaattgttctcaattgtggaagaggagaatttggacagcagaacaaaaaaggaagacagcctcttggagcagatacatttgtcacaggaagccacatcaaaccctggggcctttgctgggcctctccatctgcccagttactgggaggtagatagccccaggaaggaatccagtcaggcctgggcaccaggccaggagtggataaagctagaaagagacaccacagaagagaagatgtttgaacagctgaagccaatcgaacctagagattgctggagggaggcacgggtgaagaagaagccagtcacctttgaggatgtggcagtgaatttcacccaggaagagtgggactgtctagatgccagccagagggtcctttaccaggatgttatgtcggaaacctttaagaatctaacatctgtggccagaatctttctgcataagccagagctaatcaccaagcttgagcaagaagaggaacagtggagagagtttgtccatctcccaaacacagaaggcctttcagaaggcaagaagaaagagcttcgagaacaacatcccagtctgagagatgaggggactagtgatgacaaggtcttccttgcatgcagaggggccggccagtgccccctatctgccccagctgggactatggacaggacccgggtgcttcaagcatcccaggctgggccaccctttttttgctacacctgtggcaaatgtttcagcaggcgctcctacctctatagccaccagtttgttcacaatcccaagctgactaacagctgcagtcagtgtgggaagttgtttcggagccccaagtccctcagctatcacagacgcatgcatcttggggagaggcccttctgttgcacgctctgtgacaagacctactgtgatgcttctggactaagtcgtcaccgccgcgtccatctgggttaccggccccattcatgctctgtgtgtgggaagagcttccgggaccagtctgagctcaaacgccaccagaagatacaccaaaaccaggagccagtggatggaaaccaggagtgtactttgaggattccaggcacccaggctgaattccagacacccatcgccagaagccagaggtccatccaggggcttttggatgtgaaccatgcaccagtggccaggtcccaggaacccatatttagaactgagggtcctatggcccagaaccaggcatctgtacttaagaaccaagcacctgtgaccaggacccaggcacccatcactggaaccctctgtcaggatgccagatccaactctcatccagtgaagccctcaagactcaatgtcttctgttgcccccattgttctttgacttttagcaagaaatcctatctctccagacaccagaaggcccacctcacagagccgcccaactactgcttccattgcagcaagtctttcagctcattttccaggctggtcagacaccagcagacccactggaagcagaagagctacctttgccctatctgtgacctctcctttggggagaaagagggccttatggatcactggaggggctataaaggcaaggacctgtgccagagcagccaccataaatgccgggtgatcctgggccagtggcttggcttctctcatgatgtccccactatggctggggaggaatggaagcatggaggtgatcaatctccccccaggatccatacccccaggagaagaggcctaagagagaaggcctgcaaaggagacaaaacaaaggaggcagtgagcatcttgaaacataaataaatggcctttctgactga

SEQ ID NO: 7377 - DNA, 316 bp, Homo sapiens
gaagaaaatgttttgttttggctagcatgtgaagattttaagaaaatgcaagataagacgcaggcctggaagaatttactgaaacacccgatgttagactccctggaaaccatctcatacggccgggcagaccgagatctttaatctcatgaagtacgacagctacagccgcttcttaaagtctgacttgtttttaaaacacaagcgaaccgaggaagaggaagaagatttgcctgatgctcaaactgcagctaaaagagcttccagaatttataacacatgagcccccaaaaagccgggactggcagctttaaga

SEQ ID NO: 7378 - DNA, 1189 bp, Homo sapiens
ccctttaatgagttcttgttttcctgactgcagctctcttcattctgccaaccttttccaactccatgatgatcctgcaggtttcagggggcccctggacagtggctctgacagcattactgatggtgctgctcatatctgtggtccagagcagggccactccagagaattccgtctaccaggaacggcaggaatgctatgcgttcaatgggactcagcgcgttgtggacgggctcatctacaaccgggaggaatacgtgcattttgacagcgcagtgggggagttcctagcagtgatggagctggggcggcccataggcgagtacttcaatagccagaaggactttatggaacggaagcgagccgaggtggacaaggtgtgcagacacaagtacgagctgatggagccactcatccggcagcgccgaggagacgtaaccataactgctgttagggggtgttggacgacgattctttctggctacttcctgctgaaaaggggcgtcgtgttggggggctgcagttggggctcctcctgaggttgatctaaggcttcttggaagaatggcatgtccatgtgtggctttgtttgcagcaccatttgaagtttgattgcttctaggcaaaaagagataaattttacaagaaggtttaaaatatagggttaccatatgagtattaagattaccacctatagactgtaactatggcagtaaagtttgatacctgttacaccaatggattgtaatactggtttgtctccactagatgtcgctgtacattaccagaaacgttaatataaaagcatcatttcctttgagaaaaacatgtttcccccttgacttgctattagggcataatttttggtttaggccattctttataacttatgatatgattgggagaaaaacgttattggatggctaaaataactttggtgttaatcttggcaattcctttcctttaattattaaatttcttaattattaaattctttcatgactttcacagaccctcttacaatgtactcaactttctgacttgtcttaaacaaccagtcatttccttttaggacaagaatttactatacaagatcctttcttatataaaatctctttatttgtaaccttctttccatagcttagagtgcaccatttaccaatcttcaataaaaaagtcctatcaaact

SEQ ID NO: 7379 - DNA, 1708 bp, Homo sapiens
cccggaggagtcacgtagctctgcgacatccgcagcctcatttaccagagggagccagggctgcagcctcatctgtttgcggatcagaacccgagctgtgcttgtggctgcggctgctaactggctgcgcacagaagctgagagaagagggtggcaataagtacttttgcctcattctgaagccttggaaggagctgtcaccatgcctcactcgtacccagccctttctgctgagcagaagaaggagttgtctgacattgccctgcggattgtagccccgggcaaaggcattctggctgcggatgagtctgtaggcagcatggccaagcggctgagccaaattggggtggaaaacacagaggagaaccgccggctgtaccgccaggtcctgttcagtgctgatgaccgtgtgaaaaagtgcattggaggcgtcattttcttccatgagaccctctaccagaaagatgataatggtgttcccttcgtccgaaccatccaggataagggcatcgtcgtgggcatcaaggttgacaagggtgtggtgcctctagctgggactgatggagaaaccaccactcaagggctggatgggctctcagaacgctgtgcccaatacaagaaggatggtgctgactttgccaagtggcgctgtgtgctgaaaatcagtgagcgtacaccctctgcacttgccattctggagaacgccaacgtgctggcccgttatgccagtatctgccagcagaatggcattgtgcctattgtggaacctgaaatattgcctgatggagaccacgacctcaaacgttgtcagtatgttacagagaaggtcttggctgctgtgtacaaggccctgagtgaccatcatgtatacctggaggggaccctgctcaagcccaacatggtgaccccgggccatgcctgtcccatcaagtataccccagaggagattgccatggcaactgtcactgccctgcgtcgcactgtgcccccagctgtcccaggagtgaccttcctgtctgggggtcagagcgaagaagaggcatcattcaacctcaatgccatcaaccgctgcccccttccccgaccctgggcgcttaccttctcctatgggcgtgccctgcaagcctctgcactcaatgcctggcgagggcaacgggacaatgctggggctgccactgaggagttcatcaagcgggctgaggtgaatgggcttgcagcccagggcaagtatgaaggcagtggagaagatggtggagcagcagcacagtcactctacattgccaaccatgcctactgagtatccactccataccacagcccttggcccagccatctgcacccacttttgcttgtagtcatggccagggccaaatagctatgcagagcagagatgccttcacctggcaccaacttgtcttcctttctctcttcccttcccctctctcattgctgcacctgggaccataggatgggaggatagggagcccctcatgactgagggcagaagaaattgctagaagtcagaacaggatggctgggtctccccctacctcttccagctcccacaattttcccatgatgaggtagcttctccctgggctctccttcttgcctgccctgtctcctgggatcagagggtagtacagaagccctgactcatgccttgagtacataccatacagcaaataaatggtagcaaaacattcta

SEQ ID NO: 7380 - DNA, 704 bp, Homo sapiens
caggaaatgctggagttcctgggcagaggggagctcctggaaaagatggtgaagttggtccttctggtcctgtgggcccgccgggtctagctggtgaaagaggagaacaaggacctccaggccccacaggttttcaggggcttcctggtcctccagggcctcctggagaaggtggaaaaccaggtgatcaaggtgttcctggagatcccggagcagttggcccgttaggacctagaggagaacgaggaaatcctggggaaagaggagaacctgggataactggactccctggtgagaagggaatggctggaggacatggtcctgatggcccaaaaggcagtccaggtccatctgggacccctggagatacaggcccaccaggtcttcaaggtatgccgggagaaagaggaattgcaggaactcctggccccaagggtgacagaggtggcataggagaaaaaggtgctgaaggcacagctggaaatgatggtgcaagagtaagtgaaagtattccttttctagctgggctaggaaccaacattacagtatcatatgagtttccctgaaccttccaaaataaagtcagtcatgtttccttggtagtcaggagttggagaataatggcatgtgagatctgctgtgattcaaccacggtttattcattttgcttaccctgaattaaatgaaacttaaataaaaacata

SEQ ID NO: 7381 - DNA, 895 bp, Homo sapiens
gaatctcagccccttctccaagacgtccatccaccacggctccccggggcccctctccgtctaccccccggcctcgtcctcctccttgtcggggggccacgccagcccgcacctcttcaccttcccgcccaccccgccgaaggacgtctccccggacccatcgctgtccaccccaggctcggccggctcggcccggcaggacgagaaagagtgcctcaagtaccaggtgcccctgcccgacagcatgaagctggagtcgtcccactcccgtggcagcatgaccgccctgggtggagcctcctcgtcgacccaccaccccatcaccacctacccgccctacgtgcccgagtacagctccggactcttcccccccagcagcctgctgggcggctcccccaccggcttcggatgcaagtccaggcccaaggcccggtccagcacagtctgcagccaggagagcagggacgtcctgtgcgaactgtcagaccaccacaaccacactctggaggaggaatgccaatggggaccctgtctgcaatgcctgtgggctctactacaagcttcacaatattaacagacccctgactatgaagaaggaaggcatccagaccagaaaccgaaaaatgtctagcaaatccaaaaagtgcaaaaaagtgcatgactcactggaggacttccccaagaacagctcgtttaacccggccgccctctccagacacatgtcctccctgagccacatctcgcccttcagccactccagccacatgctgaccacgcccacgccgatgcacccgccatccagcctgtcctttggaccacaccacccctccagcatggtcaccgccatgggttagagccctgctcgatgctcacagggcccccagcgagagtccct

SEQ ID NO: 7382 - DNA, 3841 bp, Homo sapiens
acttgacaaccagcatgccgagatggcacaccttgggcccaccccacctccacatagccttaattacaaatcagaggacaggcttagtgagcaagactggccagcatatttcaaggtcccatgttgtggggttgatacatctcaaattgagtcagaagaggcagaagtggatgtgagagaaagagagacacagagagacagagagccaaagagggcaagagacttgactttaagagactcctgtactgacaactccatgcagttcggaaccagaacgactacggctgaaccagggttcatggggacatggcaaaacgctgatactaacctcttattcagaatgtcccaacaggctggtctcaaactcctgacctcaggtgatccacccgtcttggacttccaaagtgctgggattacaggcgtgagccactgcacccggctgaaagttgctatgatttctaaggccatccgttgcacactggtaaactgcacatgtgaatgttttcagccagggaagattaacctgaggacttgtgatcagtgtaaacatggctgggtggcacatgccttggataagctcagcacgcagcacctgtaccaccccacccaagtggagattgtgcagtccaacgtcgtgtttgacatcagcagcctgatgctctatgggacacaagcagtgcctgtgcggctaaagatcctgctggaccgtctcttcagcgtcctgaagcaagaggaggtactgcacatactgcacggccttggctggactctgcgggactatgtccgaggatacatccttcaggatgctgctggcaaggtgctggaccgctgggccatcatgtctcgagaagaggaaatcatcacccttcagcagtttctgcggtttggagaaaccaaatccattgtggagctgatggcaattcaggagaaagaagggcaggccgtggctgtaccatcttcaaagacagactcagatataaggactttcattgagagcaataatcgcaccaggagtcccagcctccttgctcacttagagaacagcaatccttccagcattcatcacttcgaaaacatcccaaacagccttgcatttctgcttccattccagtacataaaccctgtctcagcaccactgctagggttgcctccaaatgggctactgttagagcaaccagggttgaggctgcgggaacccagcctttcaactcagaatgaatataatgagagcagcgaatccgaagtttctcccacaccttataagaatgatcaaacacccaatagaaatgccctgaccagcattactaatgtggagcccaaaaccgagccagcctgtgtctctcccattcagaattctgccccagtcagtgatctaaccaaaactgaacacccaaaaagctcattccggattcatcggatgagaaggatggggtcagcctctaggaaaggaagagtgttctgtaatgcatgtgggaagacattctatgacaaaggtactctcaaaattcattacaatgctgttcacctgaagatcaaacatcgatgcaccattgaaggttgcaacatggtctttagctccctccgaagtcgtaatcgccacagtgcaaaccccaatcctcgccttcacatgcctatgctaaggaataaccgagataaagatttaattcgggccacctcaggagctgccacccctgtcatagcaagtacaaaatcaaatctggcactcacaagccctggccgacccccaatgggttttaccactccccctctagaccctgtcttgcaaaatcctctccctagccagctagtattttctgggctaaagactgtacaaccagttcctccattttatagaagtttactcactccaggggaaatggtgagtcctccaacctccctcccaaccagtcccatcattccaaccagtggtaccatagagcagcaccccccgccaccctctgagccagtagtgccagcagtgatgatggccacccatgagcccagtgctgacctggcacccaagaaaaagcccaggaagtcaagcatgcctgtgaagattgagaaggaaattattgataccgccgatgagtttgatgatgaagatgatgaccccaatgatggtggagctgtggtcaatgacatgagccatgacaatcattgtcactcccaagaggagatgagcccaggcatgtctgtgaaggacttttctaagcataacaggacccggtgcatttcaaggactgaaataaggagggccgacagcatgacttctgaagaccaagaacctgagcgggactatgagaacgagtctgagtcttcggagcccaaactgggcgaggaatccatggaaggggatgagcacattcacagcgaagtgagtgaaaaagtcctgatgaatagtgagaggcctgatgagaaccacagtgagccctctcaccaggacgtcatcaaggtgaaggaagaatttacagaccccacttacgacatgttttacatgagccagtatggactgtacaatggtgggggtgccagcatggccgccttgcatgagagctttacatcgtctctgaattatggcagccctcaaaagttctccccagaaggtgacctatgttctagcccagaccccaaaatctgttatgtgtgcaagaagagtttcaaaagctcctacagtgtgaaacttcactacaggaacgttcacttgaaagagatgcacgtctgcacagtggctggttgcaatgctgcattcccctctcgccgaagccgagacagacacagtgccaacataaacctacatcgtaaactgttgaccaaagaactcgatgacatgggcctggactcgtcgcagccctcccttagcaaggacctccgcgatgaatttttggtgaagatatatggtgcccagcaccccatggggctcgatgtcagggaagacgcctcctctcccgcagggactgaagactcccacctgaacgggtatgggagaggcatggcagaggactacatggtccttgacttgagcaccacctccagcctccagtccagcagcagtatccattcctccagagaatccgacgcaggcagcgatgaggggattcttctcgatgacattgacggggcgagtgacagtggggagtcggcacacaaggccgaggcccctgccctccctggcagcctaggggctgaagtttcaggatctcttatgttcagcagcttgtctgggagcaatggtgggatcatgtgcaacatttgccacaaaatgtacagcaacaaggggaccctgagagtgcactacaaaactgtgcatttgagagaaatgcacaagtgcaaagtcccaggttgcaatatgatgttttcctctgtacgaagccgaaatcggcacagtcagaaccctaatctccacaaaaacattcccttcacttcagtagattagtctcagaatggacactacaaatgccagctctcaccagatggcctacgtgtttgaactgccatagtcagtgtgcgcttatgtacttggggtgtgtgtgtgtgtgtgtgtgtgtgtgcatttatgtatgctctgtggctacatatacacacacgtatttccttgagataaacaagataaacactaggtgcttttgaatttttttcacttccctttatagttttgggaaaggagtgggatctttgatttcagggtgaaaacagagtacccctttaaacacacacacacacacatgcacatacacacacacacacacacacacacacagtgtgcaactagccccagttttgacagaataattcttggtcttccccaaagagacaatttgttgtacccatgactgttgcctgc

SEQ ID NO: 7383 - DNA, 8573 bp, Homo sapiens
gagtagctccagcggccacgctgaggcgagggtgacacaccatgctcacggcccctggagaccgtcgtgctggcgagccgtgctccgtagctccccggtccgcctcggcagcggtcagagtcgcctacaggagttgagccgcccgcgccagaaggttttggcgaagctcttggagaggcgtcgagcacagtagggcggcgggggtgcgttgagcgctcgggggtcaggcagtcggccgggatcgccgctggggagcgtttccgaggcgaggaggaggaggaggagatgctgctcctcttctccccctccccaggctccttctacagctccttcagcccacgcccgcagccgcttgtgggagaagtggtggtggctctcggcgcccgcggcggctgccggcggcccgccccgacgccgcgtccctgcagccctcgcccggcgctccagtagcaggacccggtctcgggaccagccggtaatatgcacgtgtcactagctgaggccctggaggttcggggtggaccacttcaggaggaagaaatatgggctgtattaaatcaaagtgctgaaagtctccaagaattattcagaaaagtaagcctagctgatcctgctgcccttggcttcatcatttctccatggtctctgctgttgctgccatctggtagtgtgtcatttacagatgaaaatatttccaatcaggatcttcgagcattcactgcaccagaggttcttcaaaatcagtcactaacttctctctcagatgttgaaaagatccacatttattctcttggaatgacactgtattggggggctgattatgaagtgcctcagagccaacctattaagcttggagatcatctcaacagcatactgcttggaatgtgtgaggatgttatttacgctcgagtttctgttcggactgtgctggatgcttgcagtgcccacattaggaatagcaattgtgcaccctcattttcctacgtgaaacacttggtaaaactggttctgggaaatctttctgggacagatcagctttcctgtaacagtgaacaaaagcctgatcgaagccaggctattcgagatcgattgcgaggaaaaggattaccaacaggaagaagctctacttctgatgtactagacatacaaaagcctccactctctcatcagacctttcttaacaaagggcttagtaaatctatgggatttctgtccatcaaagatacacaagatgagaattatttcaaggacattttatcagataattctggacgtgaagattctgaaaatacattctccccttaccagttcaaaactagtggcccagaaaaaaaacccatccctggcattgatgtgctttctaagaagaagatctgggcttcatccatggacttgctttgtacagctgacagagacttctcttcaggagagactgccacatatcgtcgttgtcaccctgaggcagtaacagtgcggacttcaactactcctagaaaaaaggaggcaagatactcagatggaagtatagccttggatatctttggccctcagaaaatggatccaatatatcacactcgagaattgcccacctcctcagcaatatcaagtgctttggaccgaatccgagagagacaaaagaaacttcaggttctgagggaagccatgaatgtagaagaaccagttcgaagatacaaaacttatcatggtgatgtctttagtacctccagtgaaagtccatctattatttcctctgaatcagatttcagacaagtgagaagaagtgaagcctcaaagaggtttgaatccagcagtggtctcccaggggtagatgaaaccttaagtcaaggccagtcacagagaccgagcagacaatatgaaacaccctttgaaggcaacttaattaatcaagagatcatgctaaaacggcaagaggaagaactgatgcagctacaagccaaaatggcccttagacagtctcggttgagcctatatccaggagacacaatcaaagcgtccatgcttgacatcaccagggatccgttaagagaaattgccctagaaacagccatgactcaaagaaaactgaggaatttctttggccctgagtttgtgaaaatgacaattgaaccatttatatctttggatttgccacggtctattcttactaagaaagggaagaatgaggataaccgaaggaaagtaaacataatgcttctgaacgggcaaagactggaactgacctgtgataccaaaactatatgtaaagatgtgtttgatatggttgtggcacatattggcttagtagagcatcatttgtttgctttagctaccctcaaagataatgaatatttctttgttgatcctgacttaaaattaaccaaagtggccccagagggatggaaagaagaaccaaagaaaaagaccaaagccactgttaattttactttgtttttcagaattaaattttttatggatgatgttagtctaatacaacatactctgacgtgtcatcagtattaccttcagcttcgaaaagatattttggaggaaaggatgcactgtgatgatgagacttccttattgctggcatccttggctctccaggctgagtatggagattatcaaccagaggttcatggtgtgtcttactttagaatggagcactatttgcccgccagagtgatggagaaacttgatttatcctatatcaaagaagagttacccaaattgcataatacctatgtgggagcttctgaaaaagagacagagttagaatttttaaaggtctgccaaagactgacagaatatggagttcattttcaccgagtgcaccctgagaagaagtcacaaacaggaatattgcttggagtctgttctaaaggtgtccttgtgtttgaagttcacaatggagtgcgcacattggtccttcgctttccatggagggaaaccaagaaaatatctttttctaaaaagaaaatcacattgcaaaatacatcagatggaataaaacatggcttccagacagacaacagtaagatatgccagtacctgctgcacctctgctcttaccagcataagttccagctacagatgagagcaagacagagcaaccaagatgcccaagatattgagagagcttcgtttaggagcctgaatctccaagcagagtctgttagaggatttaatatgggacgagcaatcagcactggcagtctggccagcagcaccctcaacaaacttgctgttcgacctttatcagttcaagctgagattctgaagaggctatcctgctcagagctgtcgctttaccagccattgcaaaacagttcaaaagagaagaatgacaaagcttcatgggaggaaaagcctagagagatgagtaaatcataccatgatctcagtcaggcctctctctatccacatcggaaaaatgtcattgttaacatggaacccccaccacaaaccgttgcagagttggtgggaaaaccttctcaccagatgtcaagatctgatgcagaatctttggcaggagtgacaaaacttaataattcaaagtctgttgcgagtttaaatagaagtcctgaaaggaggaaacatgaatcagactcctcatccattgaagaccctgggcaagcatatgttctaggaatgactatgcatagttctggaaactcttcatcccaagtacccttaaaagaaaatgatgtgctacacaaaagatggagcatagtatcttcaccagaaagggagatcaccttagtgaacctgaaaaaagatgcaaagtatggcttgggatttcaaattattggtggggagaagatgggaagactggacctaggcatatttatcagttcagttgcccctggaggaccagctgacttggatggatgcttgaagccaggagaccgtttgatatctgtgaatagtgtgagtctggagggagtcagccaccatgctgcaattgaaattttgcaaaatgcacctgaagatgtgacacttgttatctctcagccaaaagaaaagatatccaaagtgccttctactcctgtgcatctcaccaatgagatgaaaaactacatgaagaaatcttcctacatgcaagacagtgctatagattcttcttccaaggatcaccactggtcacgtggtaccctgaggcacatctcggagaactcctttgggccatctgggggcctgcgggaaggaagcctgagttctcaagattccaggactgagagtgccagcttgtctcaaagccaggtcaatggtttctttgccagccatttaggtgaccaaacctggcaggaatcacagcatggcagcccttccccatctgtaatatccaaagccaccgagaaagagactttcactgatagtaaccaaagcaaaactaaaaagccaggcatttctgatgtaactgattactcagaccgtggagattcagacatggatgaagccacttactccagcagtcaggatcatcaaacaccaaaacaggaatcttcctcttcagtgaatacatccaacaagatgaattttaaaactttttcttcatcacctcctaagcctggagatatctttgaggttgaactggctaaaaatgataacagcttggggataagtgtcacggtactgtttgacaagggaggtgtgaatacgagtgtcagacatggtggcatttatgtgaaagctgttattccccagggagcagcagagtctgatggtagaattcacaaaggtgatcgcgtcctagctgtcaatggagttagtctagaaggagccacccataagcaagctgtggaaacactgagaaatacaggacaggtggttcatctgttattagaaaagggacaatctccaacatctaaagaacatgtcccggtaaccccacagtgtaccctttcagatcagaatgcccaaggtcaaggcccagaaaaagtgaagaaaacaactcaggtcaaagactacagctttgtcactgaagaaaatacatttgaggtaaaattatttaaaaatagctcaggtctaggattcagtttttctcgagaagataatcttataccggagcaaattaatgccagcatagtaagggttaaaaagctctttcctggacagccagcagcagaaagtggaaaaattgatgtaggagatgttatcttgaaagtgaatggagcctctttgaaaggactatctcagcaggaagtcatatctgctctcaggggaactgctccagaagtattcttgcttctctgcagacctccacctggtgtgctaccggaaattgatactgcgcttttgaccccacttcagtctccagcacaagtacttccaaacagcagtaaagactcttctcagccatcatgtgtggagcaaagcaccagctcagatgaaaatgaaatgtcagacaaaagcaaaaaacagtgcaagtccccatccagaagagacagttacagtgacagcagtgggagtggagaagatgacttagtgacagctccagcaaacatatcaaattcgacctggagttcagctttgcatcagactctaagcaacatggtatcacaggcacagagtcatcatgaagcacccaagagtcaagaagataccatttgtaccatgttttactatcctcagaaaattcccaataaaccagagtttgaggacagtaatccttcccctctaccaccggatatggctcctgggcagagttatcaaccccaatcagaatctgcttcctctagttcgatggataagtatcatatacatcacatttctgaaccaactagacaagaaaactggacacctttgaaaaatgacttggaaaatcaccttgaagactttgaactggaagtagaactcctcattaccctaattaaatcagaaaaaggaagcctgggttttacagtaaccaaaggcaatcagagaattggttgttatgttcatgatgtcatacaggatccagccaaaagtgatggaaggctaaaacctggggaccggctcataaaggttaatgatacagatgttactaatatgactcatacagatgcagttaatctgctccgggctgcatccaaaacagtcagattagttattggacgagttctagaattacccagaataccaatgttgcctcatttgctaccggacataacactaacgtgcaacaaagaggagttgggtttttccttatgtggaggtcatgacagcctttatcaagtggtatatattagtgatattaatccaaggtccgtcgcagccattgagggtaatctccagctattagatgtcatccattatgtgaacggagtcagcacacaaggaatgaccttggaggaagttaacagagcattagacatgtcacttccttcattggtattgaaagcaacaagaaatgatcttccagtggtccccagctcaaagaggtctgctgtttcagctccaaagtcaaccaaaggcaatggttcctacagtgtggggtcttgcagccagcctgccctcactcctaatgattcattctccacggttgctggggaagaaataaatgaaatatcgtaccccaaaggaaaatgttctacttatcagataaagggatcaccaaacttgactctgcccaaagaatcttatatacaagaagatgacatttatgatgattcccaagaagctgaagttatccagtctctgctggatgttgtggatgaggaagcccagaatcttttaaacgaaaataatgcagcaggatactcctgtggtccaggtacattaaagatgaatgggaagttatcagaagagagaacagaagatacagactgcgatggttcacctttacctgagtattttactgaggccaccaaaatgaatggctgtgaagaatattgtgaagaaaaagtaaaaagtgaaagcttaattcagaagccacaagaaaagaagactgatgatgatgaaataacatggggaaatgatgagttgccaatagagagaacaaaccatgaagattctgataaagatcattcctttctgacaaacgatgagctcgctgtactccctgtcgtcaaagtgcttccctctggtaaatacacgggtgccaacttaaaatcagtcattcgagtcctgcggggtttgctagatcaaggaattccttctaaggagctggagaatcttcaagaattaaaacctttggatcagtgtctaattgggcaaactaaggaaaacagaaggaagaacagatataaaaatatacttccctatgatgctacaagagtgcctcttggagatgaaggtggctatatcaatgccagcttcattaagataccagttgggaaagaagagttcgtttacattgcctgccaaggaccactgcctacaactgttggagacttctggcagatgatttgggagcaaaaatccacagtgatagccatgatgactcaagaagtagaaggagaaaaaatcaaatgccagcgctattggcccaacatcctaggcaaaacaacaatggtcagcaacagacttcgactggctcttgtgagaatgcagcagctgaagggctttgtggtgagggcaatgacccttgaagatattcagaccagagaggtgcgccatatttctcatctgaatttcactgcctggccagaccatgatacaccttctcaaccagatgatctgcttacttttatctcctacatgagacacatccacagatcaggcccaatcattacgcactgcagtgctggcattggacgttcagggaccctgatttgcatagatgtggttctgggattaatcagtcaggatcttgattttgacatctctgatttggtgcgctgcatgagactacaaagacacggaatggttcagacagaggatcaatatattttctgctatcaagtcatcctttatgtcctgacacgtcttcaagcagaagaagagcaaaaacagcagcctcagcttctgaagtgacatgaaaagagcctctggatgcatttccatttctctccttaacctccagcagactcctgctctctatccaaaataaagatcacagagcagcaagttcatacaacatgcatgttctcctctatcttagaggggtattcttcttgaaaataaaaaatattgaaatgctgtatttttacagctactttaacctatgataattatttacaaaattttaacactaaccaaacaatgcagatcttagggatgattaaaggcagcatttgatgatagcagacattgttacaaggacatggtgagtctatttttaatgcaccaatcttgtttatagcaaaaatgttttccaatattttaataaagtagttattttataggggatacttgaaaccagtatttaagctttaaatgacagtaatattggcatagaaaaaagtagcaaatgtttactgtatcaatttctaatgtttactatatagaatttcctgtaatatatttatatactttttcatgaaaatggagttatcagttatctgtttgttactgcatcatctgtttgtaatcattatctcactttgtaaataaaaacacaccttaaaacatgaacaagccaaaactgtgtgcag

SEQ ID NO: 7384 - DNA, 1475 bp, Homo sapiens
atgaggttcacatttacaagccggtgcttggcactgtttcttcttctaaatcacccaaccccaattcttcctgccttttcaaatcaaacctatccaacaatagagcccaagccatttctttacgtcgtaggacgaaagaagatgatggatgcacagtacaaatgctatgaccgaatgcagcagttacccgcataccaaggagaaggtccatattgcaatcgcacctgggatggatggctgtgctgggatgacacaccggctggagtattgtcctatcagttctgcccagattattttccggattttgatccatcagaaaaggttacaaaatactgtgatgaaaaaggtgtttggtttaaacatcctgaaaacaatcgaacctggtccaactatactatgtgcaatgctttcactcctgagaaactgaagaatgcatatgttctgtactatttggctattgtgggtcattctttgtcaattttcaccctagtgatttccctggggattttcgtgtttttcaggagccttggctgccaaagggtaaccctgcacaagaacatgtttcttacttacattctgaattctatgattatcatcatccacctggttgaagtagtacccaatggagagctcgtgcgaagggacccggtgagctgcaagattttgcattttttccaccagtacatgatggcctgcaactatttctggatgctctgtgaagggatctatcttcatacactcattgtcgtggctgtgtttactgagaagcaacgcttgcggtggtattatctcttgggctgggccccagccttccacagagactaatctttcctttccctggccttctcatccggttcccgctggtgccaaccactatccatgctattaccagggccgtgtacttcaatgacaactgctggctgagtgtggaaacccatttgctttacataatccatggacctgtcatggcggcacttgtggtcaatttcttctttttgctcaacattgtccgggtgcttgtgaccaaaatgagggaaacccatgaggcggaatcccacatgtacctgaaggctgtgaaggccaccatgatccttgtgcccctgctgggaatccagtttgtcgtctttccctggagaccttccaacaagatgcttgggaagatatatgattacgtgatgcactctctgattcatttccagggcttctttgttgcgaccatctactgcttctgcaacaatgaggtccaaaccaccgtgaagcgccaatgggcccaattcaaaattcagtggaaccagcgttgggggaggcgcccctccaaccgctctgctcgcgctgcagccgctgctgcggaggctggcgacatcccaatttacatctgccatcaggagctgaggaatgaaccagccaacaaccaaggcgaggagagtgctgagatcatccctttgaatatcatagagcaagagtcatctgcttga

SEQ ID NO: 7385 - DNA, 617 bp, Homo sapiens
ctgggctgcggagcgcgggcctcggcggcgcagggcttgacgcgccggaaagtcccctcgccgctggccaccagccttccagcccttacggcccacgccgtaatcctggtgaccgagaagagagcagagccactgccagaaggaaggggacaagacccagcaggacaccttctttccacgctttccagcctgtgggagcggcaggggcaacagagagaggatctggagccaggattaatgactcatttatgaagcatcttattctgcgaccgaggctcagtggtcagtggcgacgtaaatggctcgactccccgctggcattcgcttcatcatctcattctccagggatcagtggtacagagccttcatttttattttgacatttctgctgtatgcaagttttcacttatctcgaaagcctatcagcatagttaaggtaagaatcatggaaagcactgcctgtcgtctctgtgaggagttcgtcacttgaaaagcttgtggggcagaggatggggatggtagcaggtacatggggaaacagattatgtagaaacaagttattctgctgctttggcttttcggtttccctttgctaaaattaaagtcttttaaatgtt

SEQ ID NO: 7386 - DNA, 3828 bp, Homo sapiens
agctccagggggctggaagtggaagcgcagcggcagaaggagagggagagagaaagagagagaggctaattaaaaaaggatactccgagggaagagagcaagggcggtgcgccgccaaggaccaactagcggcggagcttcgatcttgcctaggcgcggagagctcccaacctgggctggaaccttgcccagcacaggtggctgctacaccccatgtaaaaagcggaaaataaaatgaagattttccagcgcaagatgcggtactggttgcttccaccttttttggcaattgtttatttctgcaccattgtccaaggtcaagtggctccacccacaaggttaagatataatgtaatatctcatgacagtatacagatttcatggaaggctccaagagggaaatttggtggttacaaacttcttgtgactccaacttcaggtggaaaaactaaccagctgaatctgcagaacactgcaactaaagcaattattcaaggccttatgccagaccagaattacacagttcaaattattgcatacaataaagataaagaaagcaagccagctcaaggccaattcagaattaaagatttagaaaaaagaaaggatccaaagcccagagtcaaagttgtggacagaggaaatgggagtagaccatcttcaccagaagaagtgaaatttgtctgtcaaactccagcaattgctgacattgtaatcctggtcgatggttcatggagtattggaagattcaacttcagactggttcggcatttcttggaaaacctggttacagcattcgatgtgggctcagagaagacacgaattggtcttgcacagtatagtggtgaccccagaatagaatggcacttgaatgcatttagcacaaaagatgaagtgattgaagctgtccgaaacctcccatataaaggaggaaatacactaacaggtcttgctttgaactacatttttgaaaatagcttcaaaccagaagcaggatcaaggactggagtatccaaaattggcattttaatcacagatggaaaatcccaagatgacattattccaccatctagaaatcttcgtgagtctggtgtagaactgtttgccataggggtgaaaaacgcggatgtgaatgagctgcaggagatcgcctctgaaccagacagcactcatgtgtacaatgttgccgaattcgatctgatgcacacagttgtggagagtctgaccaggactctctgctctagagtggaagaacaggacagagaaattaaagcctcagcccatgccatcactgggccgcctacggagttgattacttctgaagtcactgccagaagctttatggttaactggactcatgccccaggaaatgtggaaaaatacagagttgtgtattatcctaccaggggtggaaaaccagacgaggtggtggtagatggaactgtatcttccacagtgttgaaaaacttgatgtctttaactgaatatcagatagcagtctttgcaatctatgcccacactgctagtgaaggcctacggggaactgaaactacacttgctttaccgatggcttctgaccttctactgtacgacgtgactgagaacagcatgcgagtcaaatgggatgcagtgcctggggcctcaggttacctgatcctttatgctcctctaacagagggcctggctggggatgaaaaagagatgaaaattggagagacccacacagatattgaattgagtgggttgttgcccaatacagaatacacagtcacagtttatgccatgtttggagaagaggccagtgatcctgttacgggacaagaaacaacattggctttaagtccaccaagaaacctgagaatctccaatgttggctctaacagtgctcgattaacctgggacccaacttcaagacagatcaatggttatcgaattgtatataacaatgcagatgggactgaaatcaatgaggttgaagtcgatcctattactaccttccctctgaagggcttgacacctctcacagagtatactattgctattttctccatctatgatgaaggacagtcagagcctctgactggagtttttaccaccgaggaagttccagcccagcaatacttagaaattgatgaggtgacgacagacagttttagggtgacctggcatcccctctcagctgatgaagggctacacaaattgatgtggattccagtctatggggggaagactgaggaggttgtcctgaaagaagagcaggactcacatgttattgaaggcctggagcccggtacggagtatgaagtttcactattggccgtacttgatgatggaagcgagagtgaggtggtgactgctgtcgggaccacacttgacagtttttggacagaaccagctacaaccatagtgcctaccacatctgtgacttcagttttccagacgggaatcagaaacctagttgtaggtgatgaaactacttctagcctgcgggtaaaatgggacatttctgacagcgatgtgcagcagtttagggtgacctacatgacagctcaaggggaccctgaggaagaagtcataggaacggttatggtgcctggaagccagaacaacctccttctgaagcctctgcttcctgatactgaatacaaagtcacagtgactcccatctacacggatggcgaaggcgtcagcgtctccgctcctggaaaaaccttaccatcctcggggccccagaacttgcgggtgtccgaggaatggtataaccggttgcgcattacgtgggaccccccatcttccccggtgaaaggctatagaattgtctacaaacctgtcagtgttcctggtccaacactggaaacgtttgtgggagctgacattaacaccatccttatcacaaacctcctcagcggaatggactacaatgtgaagatatttgcctcccaggcctcaggcttcagcgacgccctgacaggcatggtgaaaacattgttcttgggtgttaccaatctccaagccaaacatgttgaaatgaccagcttgtgtgcccactggcaggtacatcgccatgccacagcctatagggttgttatagaatccctccaggataggcaaaagcaagaatccactgtgggtggagggacaaccaggcattgcttctatggacttcagcctgattctgaatataaaatcagtgtttatacaaagctccaggagattgaaggacctagtgtgagcataatggaaaaaacacaatcacttcctacacgaccaccaacttttcctccaaccattccaccagcaaaagaagtatgtaaggcggccaaggctgacctggtatttatggtggatggatcctggagcattggagatgaaaatttcaataagatcatcagctttctatacagcactgttggagccctgaacaagattggcacagatggaacccaacactattcacagtaacaaacatggaatgcccatcaatggtggactgcgtaaagaaaatgtggtgaacatacagcaagaaatactacgcagccataaaaaagaacaaaatcatgttctttgcagcaacacgggtgcctctggaagccattatcttgtgcaaattaacacagaaacatgaaaccaaatactgcatgctctcacttagaagtgggagctaaacatcgagtacacacggacgtaaagacgggaacaatagacactaggggctactagtagggggagaatagaaggaggctgaaggttgaaaaactgcctattgggaactatgctcactacctgggggacagaatcatttgtacaccacctctcagtgacatgccg

SEQ ID NO: 7387 - DNA, 747 bp, Homo sapiens; identical to SEQ ID NO: 6758

SEQ ID NO: 7388 - DNA, 1977 bp, Homo sapiens
ctcaagacacctcccgagtgtgtgctcactccccttccaccctcagcggatgataatctcaagacacctcccgagtgtgtgctcactccccttccaccctcagcggatgataatctcaagacacctcctgagtgtctgctcactccccttccaccctcagcggatgataatctcaagacacctcccgagtgtctgctcactccccttccaccctcagcggatgataatctcaagacacctcccgagtgtctgctcactccccctccaccctcagcggatgataatctcaagacacgtgccgagtgtctgctccatccccttccaccctcagcggatgataatctcaagacaccttccgagcgtcagctcactccccttccaccctcagctccaccctcagcagatgataatatcaagacacctgccgagcgtctgcgggggccgcttccaccctcagcggatgataatctcaagacaccttccgagcgtcagctcactccccttccaccctcagctccaccctcagcagatgataatatcaagacacctgccttccaccctcagcggatgataatctcaagacaccttccgagcgtcagctcactccccttccaccctcagctccactctcagcagatgataatatcaagatacctgctgagcgtctgcggattccgcttccaccatcagccgatgataatctcaagacaccttccgagcgtcagctcactccccttccaccctcagctccaccctcagcagatgataatatcaagacacctgccgagcgtctgcgggggccgcttccaccctcagcggatgataatctcaagacaccttccgagcgtcagctcactccccttccaccctcagctccaccctcagcagatgataatatcaagacacctgccgagcgtctgcgggggccgcttccaccctcagcggatgataatctcaagacaccttccgagcgtcagctcactccccttccaccctcagctccaccctcagcagatgataatatcaagacacctgccgagcgtctgcgggggccgcttccaccctcagcggatgataatctcaagacaccttccgagcgtcagctcactccccttccaccctcagctccaccctcagcagatgataatatcaagacacctgccgagcgtctgcggggagcgtctgcgggggccgcttccaccctcagcggatgataatctcaagacaccttccgagcgtcagctcactccccttccaccctcagctccaccctcagcagatgataatatcaagacacctgccgagcgtctgcgggggccgcttccaccctcagcggatgataatctcaagacaccttccgagcgtcagctcactccccttccaccctcagctccaccctcagcagatgataatatcaagacacctgccgagcgtctgcgggggccgcttccaccctcagcggatgataatctcaagacaccttctgagcgtcagctcactccccttccaccctcagctccaccctcagcagatgataatatcaagacacctgccgagcgtctgcgggggccgcttccaccctcagccgatgataatctcaagacacctcccttagctactcaggaggctgaggcagaaaaaccacgcaaacccaagaggcagagggcggctgagatggaaccacctcccgaacccaagaggcggagggtcggtgacgtggaaccgtcacgcaaacccaagaggcggagggccgctgacgtggaaccatcatcacccgaacccaagaggcggagggtcggtgatgtggaaccgtcacgcaaacccaagaggcggagggccgctgacgtggaaccatcatcacccgaacccaagaggcggagggtcggtgacgtggaaccgtcacgcaaacccaagaggcggagggccgctgacgtggaaccatcattacccgaacccaagaggcggaggttgagctga

SEQ ID NO: 7389 - DNA, 1849 bp, Homo sapiens
ggagacgcccgcccggtgcccgccctgggcccggcgggtgccccctgcccgccgcctgacgcaatccgaggcgcccttgctgcatgccggcgctggagaaacctcccctgccgttgcatcactcctgccaggtttgccacagaggtggagctgaaccaatcagcgggcgcgctgggcccgcggcgcggttaagtgagaagcagaatccgaagttgattggccaaaaggggatttgccccaccccaatcaccgcggcagctggccgcggtgggcgtggtctcccggcaagaaggtttaaagggcgcctccatggggggcgctcagctggagctaccgagcggtgccaggccaggtgtgtgcgtccgtcggtctttccgtgcccacgccggagaccagccccggaggccgcctgggcctatccctgtgccaggcaccatgaagcaggagtctgcagccccgaacaccccgcccacctcgcagtcccctacgccgtccgctcagttcccccgaaacgacggcgaccctcaagcgctgtggattttcgggtacggctccctggtgtggaggcccgacttcgcctacagcgacagccgtgtgggcttcgtgcgcggctacagccgccgtttctggcagggagacaccttccatcggggcagcgacaagatgcctggccgtgtggtgacgctccttgaagatcatgagggctgcacttggggcgtggcataccaagtgcaaggggagcaggtaagcaaggccctgaagtacctgaatgtgcgagaggcagtgcttggtggctacgataccaaggaggtcaccttctatccccaagatgctcctgaccaaccactgaaggcattggcctatgtggccaccccacagaaccctggttacctgggccctgcgcctgaagaggccattgccacgcagatcctggcctgccggggcttctccggccacaaccttgaatacttgctgcgtctggcagacttcatgcagctctgtgggcctcaggcgcaggacgagcacctggcagccatcgtggacgctgtgggcaccatgttgccctgcttctgccccaccgagcaggctctggcgctggtgtgaggggctgagcccctgcggggagtgctcatgtggacatcagggccagacacccactccagtgcacaagacagacttgcgaccgcttgagcccactgagcagatatggtgggtggctggaggcttctctttctcagtccctgcctgtctgccagcctgcagctctcctgcttgacactgacttactacttgaaactttatttattgcaccatgttggtgtggtgggcaggtggagggcctgccctggacacaggggccctgctgagcagtggccccatcctggaacttgaccagattccccccagtgctgctgctaaccccacaccacccaggcctccacctccccagggagtctccaagagcctcgatcctctgctcactcagcccagccatccatagccctgggaattccacctgccaaggatcccagcaggctggatgagggatagtagggcatgaggagaaggagccctgtaaggactgaggccccggccagcccttctcctccaccagttccccagagcagagctggagctgatgcctggacacagctgctgagcctggcctgggcctcttacccacttggttgttttcttgtccctctgtctgtctgtctatctacttgtctgtctgggccactcctgcctgtgtgttggtctattcctgggaagctcatcactacaggccctggcaaccttcccagtctgtcccatactgttacccataaaactatctctttatctgtgc

SEQ ID NO: 7390 - DNA, 1749 bp, Homo sapiens
atttccagcaggagctgcgagcacagtgctggctcacaacaagatgctcaaggtgtcagccgtactgtgtgtgtgtgcagccgcttggtgcagtcagtctctcgcagctgccgcggcggtggctgcagccggggggcggtcggacggcggtaattttctggatgataaacaatggctcaccacaatctctcagtatgacaaggaagtcggacagtggaacaaattccgagactaagaagaaaaacgattatttgacaggacagtagtgatgatcacacaagatcacatccacatgtcttctgggctcagtcaggatgattatttccgcacttggagtccaggaaaacccttcgatcaggctttagatccagctaaggatccatgcttaaagatgaaatgtagtcgccataaagtatgcattgctcaagattctcagactgcagtctgcattagtcaccggaggcttacacacaggatgaaagaagcaggagtagaccataggcagtggaggggtcccatattatccacctgcaagcagtgcccagtggtctatcccagccctgtttgtggttcagatggtcatacctactcttttcagtgcaaactagaatatcaggcatgtgtcttaggaaaacagatctcagtcaaatgtgaaggacattgcccatgtccttcagataagcccaccagtacaagcagaaatgttaagagagcatgcagtgacctggagttcagggaagtggcaaacagattgcgggactggttcaaggcccttcatgaaagtggaagtcaaaacaagaagacaaaaacattgctgaggcctgagagaagcagattcgataccagcatcttgccaatttgcaaggactcacttggctggatgtttaacagacttgatacaaactatgacctgctattggaccagtcagagctcagaagcatttaccttgataagaatgaacagtgtaccaaggcattcttcaattcttgtgacacatacaaggacagtttaatatctaataatgagtggtgctactgcttccagagacagcaagacccaccttgccagactgagctcagcaatattcagaagcggcaaggggtaaagaagctcctaggacagtatatccccctgtgtgatgaagatggttactacaagccaacacaatgtcatggcagtgttggacagtgctggtgtgttgacagatatggaaatgaagtcatgggatccagaataaatggtgttgcagattgtgctatagattttgagatctccggagattttgctagtggcgattttcatgaatggactgatgatgaggatgatgaagacgatattatgaatgatgaagatgaaattgaagatgatgatgaagatgaaggggatgatgatgatggtggtgatgaccatgatgtatacatttgattgatgacagttgaaatcaataaattctacatttctaatatttacaaaaatgatagcctatttaaaattatcttcttccccaataacaaaatgattctaaacctcacatatattttgtataattatttgaaaaattgcagctaaagttatagaactttatgtttaaataagaatcatttgctttgagtttttatattccttacacaaaaagaaaatacatatgcagtctagtcagacaaaataaagttttgaagtgctactataataagtttttcacgagaacaaactttgtaaatcttccataagcaaaatgacagctagtg

SEQ ID NO: 7391 - DNA, 1189 bp, Homo sapiens; identical to SEQ ID NO: 7378

SEQ ID NO: 7392 - DNA, 970 bp, Homo sapiens
aacgacgactcaagtgatccgatgggaagggcatctctgggaagagccagatcctgtttgctctcgtcttcaccaccaggtacctggacctgttcaccaacttcatctccatctacaacacagtaatgaaggtggtttttctcctctgtgcctatgttacagtgtacatgatatatgggaaattccgtaaaacttttgacagtgagaatgacacattccgcctggagtttcttctggtcccagtcattggcctttccttccttgaaaactacagtttcactctgctggagatcctctggactttctctatctatctggaatcagtggctatcctgccccagctcttcatgatcagcaagactggagaggctgagaccataactactcactacctgttctttctgggtctgtaccgggcactctacctggctaactggatcaggcggtaccagactgagaatttctatgaccaaattgcagtcgtgtctggagtagtacaaaccatcttctactgtgacttcttctacttgtatgtgaccaaagtccttaagggaaagaagttaagtcttccaatgccaatctgaggaccttcagagacagtctacgccttaacaagcacatgaaggaaactattttgaatgttctctttggcaacttatccataatttgggatcaaatgttaaaaccagaaaagtgtttagtgtggatttcagcaaaacctgatcatcccacccagaagaccttctcatcaatagatcgcccttaaagacccattgtaaggtcataaaaaacctcggccacctgcacaaagatggtgcctcactgcaacaagaaaccttaaggtgtcttaccgacgaaataaaaaacataaatgattgttctccaaggcctgagggcaagactcatgatgagcaagtcaaccccaatctggaacaatgtccctcctcttagaatgtcccaactaaagacc

SEQ ID NO: 7393 - DNA, 2401 bp, Homo sapiens
gctagaggggctgcttgcgccaggcgccggccgccccactgcgggtccctggcggccggtgtctgaggagtcggagagccgaggcggccagaccgtgcgccccgcgcttctcccgaggccgttccgggtctgaactgtaacagggaggggcctcgcaggagcagcagcgggcgagttaaagtatgctgggagcggtgaagatggaagggcacgagccgtccgactggagcagctactatgcagagcccgagggctactcctccgtgagcaacatgaacgccggcctggggatgaacggcatgaacacgtacatgagcatgtcggcggccgccatgggcagcggctcgggcaacatgagcgcgggctccatgaacatgtcgtcgtacgtgggcgctggcatgagcccgtccctggcggggatgtcccccggcgcgggcgccatggcgggcatgggcggctcggccggggcggccggcgtggcgggcatggggccgcacttgagtcccagcctgagcccgctcggggggcaggcggccggggccatgggcggcctggccccctacgccaacatgaactccatgagccccatgtacgggcaggcgggcctgagccgcgcccgcgaccccaagacctacaggcgcagctacacgcacgcaaagccgccctactcgtacatctcgctcatcaccatggccatccagcagagccccaacaagatgctgacgctgagcgagatctaccagtggatcatggacctcttccccttctaccggcagaaccagcagcgctggcagaactccatccgccactcgctctccttcaacgactgtttcctgaaggtgccccgctcgcccgacaagcccggcaagggctccttctggaccctgcaccctgactcgggcaacatgttcgagaacggctgctacctgcgccgccagaagcgcttcaagtgcgagaagcagctggcgctgaaggaggccgcaggcgccgccggcagcggcaagaaggcggccgccggagcccaggcctcacaggctcaactcggggaggccgccgggccggcctccgagactccggcgggcaccgagtcgcctcactcgagcgcctccccgtgccaggagcacaagcgagggggcctgggagagctgaaggggacgccggctgcggcgctgagccccccagagccggcgccctctcccgggcagcagcagcaggccgcggcccacctgctgggcccgccccaccacccgggcctgccgcctgaggcccacctgaagccggaacaccactacgccttcaaccacccgttctccatcaacaacctcatgtcctcggagcagcagcaccaccacagccaccaccaccaccaaccccacaaaatggacctcaaggcctacgaacaggtgatgcactaccccggctacggttcccccatgcctggcagcttggccatgggcccggtcacgaacaaaacgggcctggacgcctcgcccctggccgcagatacctcctactaccagggggtgtactcccggcccattatgaactcctcttaagaagacgacggcttcaggcccggctaactctggcaccccggatcgaggacaagtgagagagcaagtgggggtcgagactttggggagacggtgttgcagagacgcaagggagaagaaatccataacacccccaccccaacacccccaagacagcagtcttcttcacccgctgcagccgttccgtcccaaacagagggccacacagataccccacgttctatataaggaggaaaacgggaaagaatataaagttaaaaaaaagcctccggtttccactactgtgtagactcctgcttcttcaagcacctgcagattctgatttttttgttgttgttgttctcctccattgctgttgttgcagggaagtcttacttaaaaaaaaaaaaaaattttgtgagtgactcggtgtaaaaccatgtagttttaacagaaccagagggttgtactattgtttaaaaacaggaaaaaaaataatgtaagggtctgttgtaaatgaccaagaaaaagaaaaaaaaagcattcccaatcttgacacggtgaaatccaggtctcgggtccgattaatttatggtttctgcgtgctttatttatggcttataaatgtgtattctggctgcaagggccagagttccacaaatctatattaaagtgttatacccggttttatcccttgaatcttttcttccagatttttcttttctttacttggcttacaaaatatacaggcttggaaattatttcaagaaggagggagggataccctgtctggttgcaggttgtattttattttggcccagggagtgttgctgttttcccaacattttattaataaaattttcagacat

SEQ ID NO: 7394 - DNA, 1709 bp, Homo sapiens
acggccgccagccggcctcccgccagccagccccgacccgcggctccgccgcccagccgcgccccagccagccctgcggcaggaaagcatgaagggagacaccaggcatctcaatggagaggaggacgccggcgggagggaagactcgatcctcgtcaacggggcctgcagcgaccagtcctccgactcgcccccaatcctggaggctatccgcaccccggagatcagaggccgaagatcaagctcgcgactctccaagagggaggtgtccagtctgctaagctacacacaggacttgacaggcgatggcgacggggaagatggggatggctctgacaccccagtcatgccaaagctcttccgggaaaccaggactcgttcagaaagcccagcttccctgagacggcgggcaacagcatcggcaggaacgccatggccgtcccctcccagctcttaccttaccatcgacctcacagacgacacagaggacacacatgggacgccccagagcagcagtaccccctacgcccgcctagcccaggacagccagcaggggggcatggagtccccgcaggtggaggcagacagtggagatggagacagttcagagtatcaggatgggaaggagtttggaataggggacctcgtgtggggaaagatcaagggcttctcctggtggcccgccatggtggtgtcttggaaggccacctccaagcgacaggctatgtctggcatgcggtgggtccagtggtttggcgatggcaagttctccgaggtctctgcagacaaactggtggcactggggctgttcagccagcactttaatttggccaccttcaataagctcgtctcctatcgaaaagccatgtaccatgctctggagagaacaagactcgaagacgcacagctgacgactcagccacctctgactactgccccgcacccaagcgcctcaagacaaattgctataacaacggcaaagaccgaggggatgaagatcagagccgagaacaaatggcttcagatgttgccaacaacaagagcagcctggaaggaaaaaccccgtgtccttccaccctctctttgagggggggctctgtcagacatgccgggatcgcttccttgagctgttttacatgtatgatgacgatggctatcagtcttactgcactgtgtgctgcgagggccgagagctgctgctttgcagcaacacgagctgctgccggtgtttctgtgtggagtgcctggaggtgctggtgggcacaggcacagcggccgaggccaagcttcaggagccctggagctgttacatgtgtctcccgcagcgctgtcatggcgtcctgcggcgccggaaggactggaacgtgcgcctgcaggccttcttcaccagtgacacggggcttgaatatgaagcccccaagctgtaccctgccattcccgcagcccgaaggcggcccattcgagtcctgtcattgtttgatggcatcgcgacaggctacctagtcctcaaagagttgggcataaaggtaggaaagtacgtcgcttctgaagtgtgtgaggagtccattgctgttggaaccgtgaagcacgaggggaatatcaaatacgtgaacgacgtgaggaacatcacaaagaaaaatattgaagaatggggcccatttgacttggtgattggcggaagcccatgcaacgatctctcaaatgtgaat

SEQ ID NO: 7395 - DNA, 897 bp, Homo sapiens
tgggctacagtgggccgctctgcctcgctcccgcccgcctgcctcagtctccccagctctctgccacccccctcggaccagtgcctcttagatgtcgccctctggtcgcctgtgtcttctcaccatcgttggcctgattctccccaccagaggacagacgttgaaagataccacgtccagttcttcagcagactcaactatcatggacattcaggtcccgacacgagccccagatgcagtctacacagaactccagcccacctctccaaccccaacctggcctgctgatgaaacaccacaaccccagacccagacccagcaactggaaggaacggatgggcctctagtgacagatccagagacacacaagagcaccaaagcagctcatcccactgatgacaccacgacgctctctgagagaccatccccaagcacagacgtccagacagacccccagaccctcaagccatctggttttcatgaggatgaccccttcttctatgatgaacacaccctccggaaacgggggctgttggtcgcagctgtgctgttcatcacaggcatcatcatcctcaccagtggcaagtgcaggcagctgtcccggttatgccggaatcgttgcaggtgagtccatcagaaacaggagctgacaacctgctgggcacccgaagaccaagccccctgccagctcaccgtgcccagcctcctgcatcccctcgaagagcctggccagagagggaagacacagatgatgaagctggagccagggctgccggtccgagtctcctacctcccccaaccctgcccgcccctgaaggctacctggcgccttgggggctgtccctcaagttatctcctctgctaagacaaaaagtaaagcactgtggtctttgcccc

SEQ ID NO: 7396 - DNA, 619 bp, Homo sapiens
agcaaagagaaggaacggctgttgctaaaggataaaatgcctggcacctttttattaagattcagtgaaagccatctcggaggaataactttcacctgggtggaccattctgaaagtggggaagtgagattccactctgtagaaccctacaataaaggccggttgtctgctctgccattcgctgacatcctgcgagactacaaagttattatggctgaaaacattcctgaaaaccctctgaagtacctatatcctgacattcccaaagacaaagccttcggtaaacactacagctctcagccttgcgaagtttcaagaccaacagaaaggggtgacaaaggttatgttccttctgtttttatccccatctcaacaatgtgagtaatgttagtcacatgtgaaatatttttataaaaagctttcctataggagatttaaaggtagagcagagtacacataactgagaacaaagcattgtaatgtgcaatgtcccatttcctttaatacataaggctagccttcagggcacacttaccacaatctattgtgcctaaaattataaaattccccttttatatgccatatatgccacagtaagttgagtgttctgatatgaaat

SEQ ID NO: 7397 - DNA, 2621 bp, Homo sapiens
ttcgatgtgggctcagagaagacacgaattggtcttgcacagtatagtggtgaccccagaatagaatggcacttgaatgcatttagcacaaaagatgaagtgattgaagctgtccgaaacctcccatataaaggaggaaatacactaacaggtcttgctttgaactacatttttgaaaatagcttcaaaccagaagcaggatcaaggactggagtatccaaaattggcattttaatcacagatggaaaatcccaagatgacattattccaccatctagaaatcttcgtgagtctggtgtagaactgtttgccataggggtgaaaaacgcggatgtgaatgagctgcaggagatcgcctctgaaccagacagcactcatgtgtacaatgttgccgaattcgatctgatgcacacagttgtggagagtctgaccaggactctctgctctagagtggaagaacaggacagagaaattaaagcctcagcccatgccatcactgggccgcctacggagttgattacttctgaagtcactgccagaagctttatggttaactggactcatgccccaggaaatgtggaaaaatacagagttgtgtattatcctaccaggggtggaaaaccagacgaggtggtggtagatggaactgtatcttccacagtgttgaaaaacttgatgtctttaactgaatatcagatagcagtctttgcaatctatgcccacactgctagtgaaggcctacggggaactgaaactacacttgctttaccgatggcttctgaccttctactgtacgacgtgactgagaacagcatgcgagtcaaatgggatgcagtgcctggggcctcaggttacctgatcctttatgctcctctaacagagggcctggctggggatgaaaaagagatgaaaattggagagacccacacagatattgaattgagtgggttgttgcccaatacagaatacacagtcacagtttatgccatgtttggagaagaggccagtgatcctgttacgggacaagaaacaacattggctttaagtccaccaagaaacctgagaatctccaatgttggctctaacagtgctcgattaacctgggacccaacttcaagacagatcaatggttatcgaattgtatataacaatgcagatgggactgaaatcaatgaggttgaagtcgatcctattactaccttccctctgaagggcttgacacctctcacagagtatactattgctattttctccatctatgatgaaggacagtcagagcctctgactggagtttttaccaccgaggaagttccagcccagcaatacttagaaattgatgaggtgacgacagacagttttagggtgacctggcatcccctctcagctgatgaagggctacacaaattgatgtggattccagtctatggggggaagactgaggaggttgtcctgaaagaagagcaggactcacatgttattgaaggcctggagcccggtacggagtatgaagtttcactattggccgtacttgatgatggaagcgagagtgaggtggtgactgctgtcgggaccacacttgacagtttttggacagaaccagctacaaccatagtgcctaccacatctgtgacttcagttttccagacgggaatcagaaacctagttgtaggtgatgaaactacttctagcctgcgggtaaaatgggacatttctgacagcgatgtgcagcagtttagggtgacctacatgacagctcaaggggaccctgaggaagaagtcataggaacggttatggtgcctggaagccagaacaacctccttctgaagcctctgcttcctgatactgaatacaaagtcacagtgactcccatctacacggatggcgaaggcgtcagcgtctccgctcctggaaaaaccttaccatcctcggggccccagaacttgcgggtgtccgaggaatggtataaccggttgcgcattacgtgggaccccccatcttccccggtgaaaggctatagaattgtctacaaacctgtcagtgttcctggtccaacactggaaacgtttgtgggagctgacattaacaccatccttatcacaaacctcctcagcggaatggactacaatgtgaagatatttgcctcccaggcctcaggcttcagcgacgccctgacaggcatggtgaaaacattgttcttgggtgttaccaatctccaagccaaacatgttgaaatgaccagcttgtgtgcccactggcaggtacatcgccatgccacagcctatagggttgttatagaatccctccaggataggcaaaagcaagaatccactgtgggtggagggacaaccaggcattgcttctatggacttcagcctgattctgaatataaaatcagtgtttatacaaagctccaggagattgaaggacctagtgtgagcataatggaaaaaacacaatcacttcctacacgaccaccaacttttcctccaaccattccaccagcaaaagaaggtaaaagaataatagaataattatctgattctaggtttaggatttgtgttggttttgtttgcctgttcatttcaaaccaggatattaataaagtatatttattgtgcta

SEQ ID NO: 7398 - DNA, 3720 bp, Homo sapiens
ctgaggtggaccccgctaaactcttccaccattattgggtaccgcatcacagtagttgcggcaggagaaggtatccctatttttgaagattttgtggactcctcagtaggatactacacagtcacagggctggagccgggcattgactatgatatcagcgttatcactctcattaatggcggcgagagtgcccctactacactgacacaacaaacggctgttcctcctcccactgacctgcgattcaccaacattggtccagacaccatgcgtgtcacctgggctccacccccatccattgatttaaccaacttcctggtgcgttactcacctgtgaaaaatgaggaagatgttgcagagttgtcaatttctccttcagacaatgcagtggtcttaacaaatctcctgcctggtacagaatatgtagtgagtgtctccagtgtctacgaacaacatgagagcacacctcttagaggaagacagaaaacaggtcttgattccccaactggcattgacttttctgatattactgccaactcttttactgtgcactggattgctcctcgagccaccatcactggctacaggatccgccatcatcccgagcacttcagtgggagacctcgagaagatcgggtgccccactctcggaattccatcaccctcaccaacctcactccaggcacagagtatgtggtcagcatcgttgctcttaatggcagagaggaaagtcccttattgattggccaacaatcaacagtttctgatgttccgagggacctggaagttgttgctgcgacccccaccagcctactgatcagctgggatgctcctgctgtcacagtgagatattacaggatcacttacggagagacaggaggaaatagccctgtccaggagttcactgtgcctgggagcaagtctacagctaccatcagcggccttaaacctggagttgattataccatcactgtgtatgctgtcactggccgtggagacagccccgcaagcagcaagccaatttccattaattaccgaacagaaattgacaaaccatcccagatgcaagtgaccgatgttcaggacaacagcattagtgtcaagtggctgccttcaagttcccctgttactggttacagagtaaccaccactcccaaaaatggaccaggaccaacaaaaactaaaactgcaggtccagatcaaacagaaatgactattgaaggcttgcagcccacagtggagtatgtggttagtgtctatgctcagaatccaagcggagagagtcagcctctggttcagactgcagtaaccactattcctgcaccaactgacctgaagttcactcaggtcacacccacaagcctgagcgcccagtggacaccacccaatgttcagctcactggatatcgagtgcgggtgacccccaaggagaagaccggaccaatgaaagaaatcaaccttgctcctgacagctcatccgtggttgtatcaggacttatggtggccaccaaatatgaagtgagtgtctatgctcttaaggacactttgacaagcagaccagctcagggagttgtcaccactctggagaatgtcagcccaccaagaagggctcgtgtgacagatgctactgagaccaccatcaccattagctggagaaccaagactgagacgatcactggcttccaagttgatgccgttccagccaatggccagactccaatccagagaaccatcaagccagatgtcagaagctacaccatcacaggtttacaaccaggcactgactacaagatctacctgtacaccttgaatgacaatgctcggagctcccctgtggtcatcgacgcctccactgccattgatgcaccatccaacctgcgtttcctggccaccacacccaattccttgctggtatcatggcagccgccacgtgccaggattaccggctacatcatcaagtatgagaagcctgggtctcctcccagagaagtggtccctcggccccgccctggtgtcacagaggctactattactggcctggaaccgggaaccgaatatacaatttatgtcattgccctgaagaataatcagaagagcgagcccctgattggaaggaaaaagacagacgagcttccccaactggtaacccttccacaccccaatcttcatggaccagagatcttggatgttccttccacagttcaaaagacccctttcgtcacccaccctgggtatgacactggaaatggtattcagcttcctggcacttctggtcagcaacccagtgttgggcaacaaatgatctttgaggaacatggttttaggcggaccacaccgcccacaacggccacccccataaggcataggccaagaccatacccgccgaatgtaggtgaggaaatccaaattggtcacatccccagggaagatgtagactatcacctgtacccacacggtccgggactcaatccaaatgcctctacaggacaagaagctctctctcagacaaccatctcatgggccccattccaggacacttctgagtacatcatttcatgtcatcctgttggcactgatgaagaacccttacagttcagggttcctggaacttctaccagtgccactctgacaggcctcaccagaggtgccacctacaacgtcatagtggaggcactgaaagaccagcagaggcataaggttcgggaagaggttgttaccgtgggcaactctgtcaacgaaggcttgaaccaacctacggatgactcgtgctttgacccctacacagtttcccattatgccgttggagatgagtgggaacgaatgtctgaatcaggctttaaactgttgtgccagtgcttaggctttggaagtggtcatttcagatgtgattcatctagatggtgccatgacaatggtgtgaactacaagattggagagaagtgggaccgtcagggagaaaatggccagatgatgagctgcacatgtcttgggaacggaaaaggagaattcaagtgtgaccctcatgaggcaacgtgttatgatgatgggaagacataccacgtaggagaacagtggcagaaggaatatctcggtgccatttgctcctgcacatgctttggaggccagcggggctggcgctgtgacaactgccgcagacctgggggtgaacccagtcccgaaggcactactggccagtcctacaaccagtattctcagagataccatcagagaacaaacactaatgttaattgcccaattgagtgcttcatgcctttagatgtacaggctgacagagaagattcccgagagtaaatcatctttccaatccagaggaacaagcatgtctctctgccaagatccatctaaactggagtgatgttagcagacccagcttagagttcttctttctttcttaagccctttgctctggaggaagttctccagcttcagctcaactcacagcttctccaagcatcaccctgggagtttcctgagggttttctcataaatgagggctgcacattgcctgttctgcttcgaagtattcaataccgctcagtattttaaatgaagtgattctaagatttggtttgggatcaataggaaagcatatgcagccaaccaagatgcaaatgttttgaaatgatatgaccaaaattttaagtaggaaagtcacccaaacacttctgctttcacttaagtgtctggcccgcaatactg

SEQ ID NO: 7399 - DNA, 566 bp, Homo sapiens
agatggctcaggagtggagcttttgtggcaggtgggtagaggctgctggagggggctttcatgatcatctgctttgagggataaacattgcttgtcccctcctccaactaaggaagttagtttgcagaattactctcctatgatggcacagaaatcacaaggatctgacaaccttcaggaaggccaggaaaagagcaagagagagatcctgaagtgcaccaaaagcgcgtgggctccgctggatgagtggctgccccctgaccctgaggaggaaagccagagtctcaccatccccatgctggaagattccaagcaagaaagtattcagcagtggctggactctggattctttgtctctgcaaatgaaaactttcaacaagtcattgaccgcactgtttctttgtatgaacaagggatggttcaaatgactgtgaaagactacatgagatctttgcatcagttttcagaaactcccatcctatccagagggaccagtttcaactcttgctattctactgcaagtgtaccacaaagcattcctgaatggctggaattttgggagatag

SEQ ID NO: 7400 - DNA, 1437 bp, Homo sapiens
atgctagggtctttggggctttgggcattacttcccacagctgtggaagcacccccaaacaggcgaacctgtgtgttctttgaggcccctggagtgcggggaagcacaaagacactgggagagctgctagatacaggcacagagctccccagagctatccgctgcctctacagccgctgctgctttgggatctggaacctgacccaagaccgggcacaggtggaaatgcaaggatgccgagacagtgatgagccaggctgtgagtccctccactgtgacccaagtccccgagcccaccccagccctggctccactctcttcacctgctcctgtggcactgacttctgcaatgccaattacagccatctgcctcctccagggagccctgggactcctggctcccagggtccccaggctgccccaggtgagtccatctggatggcactggtgctgctggggctgttcctcctcctcctgctgctgctgggcagcatcatcttggccctgctacagcgaaagaactacagagtgcgaggtgagccagtgccagagccaaggccagactcaggcagggactggagtgtggagctgcaggagctgcctgagctgtgtttctcccaggtaatccgggaaggaggtcatgcagtggtttgggccgggcagctgcaaggaaaactggttgccatcaaggccttcccaccgaggtctgtggctcagttccaagctgagagagcattgtacgaacttccaggcctacagcacgaccacattgtccgatttatcactgccagccgggggggtcctggccgcctgctctctgggcccctgctggtactggaactgcatcccaagggctccctgtgccactacttgacccagtacaccagtgactggggaagttccctgcggatggcactgtccctggcccagggcctggcatttctccatgaggagcgctggcagaatggccaatataaaccaggtattgcccaccgagatctgagcagccagaatgtgctcattcgggaagatggatcgtgtgccattggagacctgggccttgccttggtgctccctggcctcactcagccccctgcctggacccctactcaaccacaaggcccagctgccatcatggaagaccctgatgggctgagggagctcctagaagactgttgggatgcagacccagaagcacggctgacagctgagtgtgtacagcagcgcctggctgccttggcccatcctcaagagagccacccctttccagagagctgtccacgtggctgcccacctctctgcccagaagactgtacttcaattcctgcccctaccatcctcccctgtaggcctcagcggagtgcctgccacttcagcgttcagcaaggcccttgttccaggaatcctcagcctgcctgtaccctttctcctgtgtaa

SEQ ID NO: 7401 - DNA, 580 bp, Homo sapiens
atcaagaaatccaaacctatactattgcagtgattaatgcgcttttcctgaaggctcctgatgagaggaggcaggttgatgtagagagcaatgttgacatccttgattgtcctctgactgagatggcgaatattttggctcagaagcaactgcgttccatcattttaacacatgtcatccgagcccagcgggccatcaacaatgagatggcgcaccagctgtatgttctacaagtgctcacctttaacctcctggaagacaggatgatgaccaaaatggacccccaggaccaggctcagagggacatcatatttgaacttcgaagaattgcttttgatgctgagtctgaacctaacaacagcagtggcagcatggagaaacgcaagtccatgtacacgcgagattataagaagcttgggttcattaatcatgtcaaccctgccatggacttcacgcagactccacctgggatgttggctctggacaacatgctgtactttgccaagcaccaccaagatgcctacatccggattgtgcttgagaacagtagtcgagaagacaagcatgaatgtccctttgg

SEQ ID NO: 7402 - DNA, 3557 bp, Homo sapiens
gagagggtccttcagggtctgcttatgcccttgttcaagaacaccagtgtcagctctctgtactctggttgcagactgaccttgctcaggcctgagaaggatggggcagccaccagagtggatgctgtctgcacccatcgtcctgaccccaaaagccctggactggacagagagcggctgtactggaagctgagccagctgacccacggcatcactgagctgggcccctacaccctggacaggcacagtctctatgtcaatggtttcacccatcagagctctatgacgaccaccagaactcctgatacctccacaatgcacctggcaacctcgagaactccagcctccctgtctggacccatgaccgccagccctctcctggtgctattcacaattaacttcaccatcactaacctgcggtatgaggagaacatgcatcaccctggctctagaaagtttaacaccacggagagagtccttcagggtctgctcaggcctgtgttcaagaacaccagtgttggccctctgtactctggctgcagactgaccttgctcaggcccaagaaggatggggcagccaccaaagtggatgccatctgcacctaccgccctgatcccaaaagccctggactggacagagagcagctatactgggagctgagccagctgacccacagcatcactgagctgggcccctacaccctggacagggacagtctctatgtcaatggtttcacacagcggagctctgtgcccaccactagcattcctgggacccccacagtggacctgggaacatctgggactccagtttctaaacctggtccctcggctgccagccctctcctggtgctattcactctcaacttcaccatcaccaacctgcggtatgaggagaacatgcagcaccctggctccaggaagttcaacaccacggagagggtccttcagggcctgctcaggtccctgttcaagagcaccagtgttggccctctgtactctggctgcagactgactttgctcaggcctgaaaaggatgggacagccactggagtggatgccatctgcacccaccaccctgaccccaaaagccctaggctggacagagagcagctgtattgggagctgagccagctgacccacaatatcactgagctgggcccctatgccctggacaacgacagcctctttgtcaatggtttcactcatcggagctctgtgtccaccaccagcactcctgggacccccacagtgtatctgggagcatctaagactccagcctcgatatttggcccttcagctgccagccatctcctgatactattcaccctcaacttcaccatcactaacctgcggtatgaggagaacatgtggcctggctccaggaagttcaacactacagagagggtccttcagggcctgctaaggcccttgttcaagaacaccagtgttggccctctgtactctggctgcaggctgaccttgctcaggccagagaaagatggggaagccaccggagtggatgccatctgcacccaccgccctgaccccacaggccctgggctggacagagagcagctgtatttggagctgagccagctgacccacagcatcactgagctgggcccctacacactggacagggacagtctctatgtcaatggtttcacccatcggagctctgtacccaccaccagcaccggggtggtcagcgaggagccattcacactgaacttcaccatcaacaacctgcgctacatggcggacatgggccaacccggctccctcaagttcaacatcacagacaacgtcatgcagcacctgctcagtcctttgttccagaggagcagcctgggtgcacggtacacaggctgcagggtcatcgcactaaggtctgtgaagaacggtgctgagacacgggtggacctcctctgcacctacctgcagcccctcagcggcccaggtctgcctatcaagcaggtgttccatgagctgagccagcagacccatggcatcacccggctgggcccctactctctggacaaagacagcctctaccttaacggttacaatgaacctggtccagatgagcctcctacaactcccaagccagccaccacattcctgcctcctctgtcagaagccacaacagccatggggtaccacctgaagaccctcacactcaacttcaccatctccaatctccagtattcaccagatatgggcaagggctcagctacattcaactccaccgagggggtccttcagcacctgctcagacccttgttccagaagagcagcatgggccccttctacttgggttgccaactgatctccctcaggcctgagaaggatggggcagccactggtgtggacaccacctgcacctaccaccctgaccctgtgggccccgggctggacatacagcagctttactgggagctgagtcagctgacccatggtgtcacccaactgggcttctatgtcctggacagggatagcctcttcatcaatggctatgcaccccagaatttatcaatccggggcgagtaccagataaatttccacattgtcaactggaacctcagtaatccagaccccacatcctcagagtacatcaccctgctgagggacatccaggacaaggtcaccacactctacaaaggcagtcaactacatgacacattccgcttctgcctggtcaccaacttgacgatggactccgtgttggtcactgtcaaggcattgttctcctccaatttggaccccagcctggtggagcaagtctttctagataagaccctgaatgcctcattccattggctgggctccacctaccagttggtggacatccatgtgacagaaatggagtcatcagtttatcaaccaacaagcagctccagcacccagcacttctacctgaatttcaccatcaccaacctaccatattcccaggacaaagcccagccaggcaccaccaattaccagaggaacaaaaggaatattgaggatgcgctcaaccaactcttccgaaacagcagcatcaagagttatttttctgactgtcaagtttcaacattcaggtctgtccccaacaggcaccacaccggggtggactccctgtgtaacttctcgccactggctcggagagtagacagagttgccatctatgaggaatttctgcggatgacccggaatggtacccagctgcagaacttcaccctggacaggagcagtgtccttgtggatgggtattctcccaacagaaatgagcccttaactgggaattctgaccttcccttctgggctgtcatcctcatcggcttggcaggactcctgggagtcatcacatgcctgatctgcggtgtcctggtgaccacccgccggcggaagaaggaaggagaatacaacgtccagcaacagtgcccaggctactaccagtcacacctagacctggaggatctgcaatgactggaacttgccggtgcctggggtgcctttcccccagccagggtccaaagaagcttggctggggcagaaataaaccatattggtcg

SEQ ID NO: 7403 - DNA, 1950 bp, Homo sapiens
atgaagccaggagcgcctcaaagtccagcctgctgttgaccaacactaacagatgagcaaggagctggcagcaatggggcctggagcttcaggggacggggtcaggactgagacagctccacacatagcactggactccagagttggtctgcacgcctacgacatcagcgtggtggtcatctactttgtcttcgtcattgctgtggggatctggtcgtccatccgtgcaagtcgagggaccattggcggctatttcctggccgggaggtccatgagctggtggccaattggagcatctctgatgtccagcaatgtgggcagtggcttgttcatcggcctggctgggacaggggctgccggaggccttgccgtaggtggcttcgagtggaacgcaacctggctgctcctggcccttggctgggtcttcgtccctgtgtacatcgcagcaggtgtggtcacaatgccgcagtatctgaagaagcgatttgggggccagaggatccaggtgtacatgtctgtcctgtctctcatcctctacatcttcaccaagatctcgactgacatcttctctggagccctcttcatccagatggcattgggctggaacctgtacctctccacagggatcctgctggtggtgactgccgtctacaccattgcaggtggcctcatggccgtgatctacacagatgctctgcagacggtgatcatggtagggggagccctggtcctcatgtttctgggtcattgtgcagcggtctctctcggccaagagtctgtctcatgccaagggaggctccgtgctggggggctacctgaagatcctccccatgttcttcatcgtcatgcctggcatgatcagccgggccctgttcccagacgaggtgggctgcgtggaccctgatgtctgccaaagaatctgtggggcccgagtgggatgttccaacattgcctaccctaagttggtcatggccctcatgcctgttggtctgcgggggctgatgattgccgtgatcatggccgctctcatgagctcactcacctccatcttcaacagcagcagcaccctgttcaccattgatgtgtggcagcgcttccgcaggaagtcaacagagcaggagctgatggtggtgggcagagtgtttgtggtgttcctggttgtcatcagcatcctctggatccccatcatccaaagctccaacagtgggcagctcttcgactacatccaggctgtcaccagttacctggccccacccatcaccgctctcttcctgctggccatcttctgcaagagggtcacagagcccggagctttctggggcctcgtgtttggcctgggagtggggcttctgcgtatgatcctggagttctcatacccagcgccagcctgtggggaggtggaccggaggccagcagtgctgaaggacttccactacctgtactttgcaatcctcctctgcgggctcactgccatcgtcattgtcattgtcagcctctgtacaactcccatccctgaggaacagctcacacgcctcacatggtggactcggaactgccccctctctgagctggagaaggaggcccacgagagcacaccggagatatccgagaggccagccggggagtgccctgcaggaggtggagcggcagagaactcgagcctgggccaggagcagcctgaagccccaagcaggtcctggggaaagttgctctggagctggttctgtgggctctctggaacaccggagcaggccctgagcccagcagagaaggctgcgctagaacagaagctgacaagcattgaggaggagccactctggagacatgtctgcaacatcaatgctgtccttttgctggccatcaacatcttcctctggggctattttgcgtgattccacagacctggcttcagtgtagacagattaaacaaagcccaagcctgtcagccac

SEQ ID NO: 7404 - DNA, 4560 bp, Homo sapiens
accccgtctcggccatgggcgagcaccccagcccgggccccgcggtggccgcctgcgccgaggcggagcgcatcgaggagctggaacccgaggccgaggagcggctgcccgcggcgccggaggaccactggaaagtcctgtttgatcagtttgaccctgggaacacaggctacattagcacaggcaagttccggagtcttctggagagccacagctccaagctggacccgcacaaaagggaggtcctcctggctcttgccgacagccacgcggatgggcagatcggctaccaggattttgtcagcctaatgagcaacaagcgttccaacagcttccgccaagccatcctgcagggcaaccgcaggctaagcagcaaggccctgctggaggagaaggggctgagcctctcgcagcgacttatccgccatgtggcctatgagaccctgccccgggaaattgaccgcaagtggtactatgacagctacacctgctgccccccaccctggttcatgatcacagtcacgctgctggaggttgcctttttcctctacaatggggtgtcactaggtcaatttgtactgcaggtaactcatccacgttacttgaagaactccctggtttaccacccacagctgcgagcacaggtttggcgctacctgacatacatcttcatgcatgcagggatagaacacctgggactcaatgtggtgctgcagctgctggtgggggtgcccctggagatggtgcatggagccacccgaattgggcttgtctacgtggccggtgttgtggcagaactggtcaggcatgaagtgccagttcaagctgctgcggatggctgtggcccttatctgtatgagcatggagtttgggcgggccgtgtggctccgcttccacccgtcggcctatcccccgtgccctcacccaagctttgtggcgcacttgggtggcgtggccgtgggcatcaccctgggcgtggtggtcctgaggaactacgagcagaggctccaggaccagtcactgtggtggatttttgtggccatgtacaccgtcttcgtgctgttcgctgtcttctggaacatctttgcctacaccctgctggacttaaagctgccgcctcccccctgagggctggaggcccaaggtcggggaggggagggaaaagcagcacccacagggagcgcctgcgaggtttcttctcatcaccagctcagctaggccgggcagacaaggacagaagactctgggccactgtaatgtttgtgtttagatttggacacacagtggagacccttttctgaaaggcatctggcggaggagttgatgtggctgctgtcgtttttctcggctgctctgatgacatcgggccagggtgaaggtctggggtggggtgtgagagtggccctccctcacctgggctgggcttcttccatggggccagggggtgccccctcactgctgcggattgagcagcagcttcttcctcctcctctaccctcagagaccctaagagacatgggaaggctcgaaggttgttgcgtccaggcatggcccctctctagctcagaaataattgcaggccatgtggtgtctccttgacacctgctgtgtctggggctccagtaagaagagggcctactggacatgtcagctgtgacctggctgaaaccagggtgccctcctgggctggttggtgtgcaccggggcatgatctgttgtgcctgggttgggcagagcagggagcctgtaggctctaggacccctcttgtgctgggggtacccagtgagagggacccatgcagggggaataaacttcattccaagttccaccctggagaagacagacccaggaccagcttcagacttctccctccctttcttccaggatattggcatctcacacgggtgccccagcctccatgcccagccttgttttagggtctttttctttccttttgctgccctgacactactttgtgcctctctttggttatggagacagtgttttgaaacattcatgcgtgtgtgtgtgtgtgtgcgtatatgtgtgtatgtgatgggaaaggtaactgaggcacgacagcgcctgcagagaaggcatggaggatgcagggggcccatgtgggcatccgtgagaggtggcagaccgtggtgtgctgtggttgctgaatgtccttgctttgacaaagcctgcccccttccttcccatctcctgtcccttccacacctgcccctgagcatcactgaccggtggcagaatggccctgctggagggagagctcaagccctccaaggatccctggatgctgaggtttgccaggttcagctcttgtttccgtctgagatggccttcatatccaaaaaggttccatcctatctcccttaggagagaaagagctttgggggcgcaagagaggctggggtaggaatgttgaggccatgtgtccatttaagttagggggacaggaggctacaggaagaggaattccagtttagttggaaaactttgcctcaggagaattgttgggtgcatggatgaacctcagagggagggcagccagtagcctcggaggcttggatgcgggagagaacatggtggttatcaaatccaccccaccccattacacaggtgagaaaacaagatggagggaatgaccctcctaacaggagctggtgcaggccccgaatggagggcatgaggatgacctttgacaaaagatgacactccctttatcgtgctcttggaattctcaaccactgacagcccagaagaacaaagaacgccaggcctgggaggaggcaggggggctgggcgtgtccagaaacaggggcaggagtgtgggaacggtcttcctccagcctggtgcccatcctggcccttgagtgtagcagggtccagggtcagtcaggccaggcatttggggtcttgggccacagtggcttcccatcctggtgactacatgtaaatgggctcactcactcactggcaggcgaggcccagccataccgcatcttggcccactgctaaatagattgccctggcctcatccacatatgtagttccctaggtcctgctcccctgcaccagtgccatgctgagggccgcagcctgtggcactgtgggcccacgcctttggcggtgttgcgtcagcctggggcgtcttgtgtgtgccctgcccaccgttctctgccctagtgatagaaagatgtagatggaagtcagtgcctcagaggaggaggctctgaggctgtggagctgggctcagggaagaccaggggaggatgcagaaggagtcaggacattgctgcctctgcctgggctgcagccgcactaagctgagcgatgaggtcctttcctggagggatggagaatcccctccagattcctgtcctggcccctggggattctgtggtgtgggtggaatgagcagagtgccacctctgtctggtatgacctggagagggggcttcctctcttaggggtgagaaagcattgaactagaagattctagaaatccctcatagaagcactcagctccctcggggactcccagggaagcttgttactgagaaggacagtggaggcggaatcgtgtctcccaccatgttaagtgtgtcctctgctgccaaggaccctcgtctacaccttagaccaccagccccagctgttctctgtcagcacacccacctccatcccctctcccaaccatgacttccaagcggggccacagggtggggtcatagggtcacttcacctgacccaggcctctccccaggtcaggaggcagctgtctggtcagaggggttctctttgtggcatctggctttctcctcagcaggtcccaccaccctctcagcagcacttccccatggccaaggctggccgtgtcctctgtgcctctttccttgtctgaggtggctgccagcccagggggtggtgtgtaaatcttcaggctggtggaggtaggttggccttttatccacaggatacagaaactgaaagctggggaatccccaaacagcagccatagactcactggctctcattaaacgggagaggaatcacagaaactggggaagggaaaacaaaccttcaaaggagaaatttcgctttaatgacaccattcatcattcgttttttaattaggaaaagctccctaatgaggctcttttgccagctaataggactctcgatttccatgagaaccattcttgcccagaggattaggggagctgttgctcaccacaccaggatcttcccccagcgtccaatttaatttgcaaatacgtaatgcagattccctgggtgccgtgaaagcctttcctggcatcattcatgttgctccccgtgctggctggaaagcacggttctcctctgccttaaaaacagtgcccaacagtgaactgcccctccgaggacttgagtaagtggaaaaaacaaaacacagactgcaatgtttgtttctaagtatttttgtattgtgtacattctgtatatttttgttgtaacatattatttgagcacagattccattaaatattttttttctttttccaagc

SEQ ID NO: 7405 - DNA, 3826 bp, Homo sapiens
atcttgactgcctgttaaacttacctatgtggagcctcatttcaaagcacgaacgcctagagattctgcttgattggttacactgggactgcccagaccctggagttctttcgagagtcccagataactgtgattgcggccgaggctgagaatcaccgcttagaagcctcagctgtgattggctaccttctcccatcaccccagagtttttaaagctgggagccaggtaccctgcaaaacccaaaatgtgtatttcctgttctgtcgcctatcacacctggcccgggtggtctaggaagggaattgcacattaatctcacctggggagattcagcaagccgtaattctccaaagcccactgaagcccaattacagccaaatccctgaggatggggcccaggtgatgtcaaggaaacacaggctggaagcaagacctgacctgagggagttcttcagccttaacctaaggtctcatactcggagcactatgacatcgccccagctagagtggactctgcagacccttctggagcagctgaacgaggatgaattaaagagtttcaaatcccttttatgggcttttcccctcgaagacgtgctacagaagaccccatggtctgaggtggaagaggctgatggcaagaaactggcagaaattctggtcaacacctcctcagaaaattggataaggaatgcgactgtgaacatcttggaagagatgaatctcacggaattgtgtaagatggcaaaggctgagatgatggaggacggacaggtgcaagaaatagataatcctgagctgggagatgcagaagaagactcggagttagcaaagccaggtgaaaaggaaggatggagaaattcaatggagaaacagtctttggtctggaagaacaccttttggcaaggagacattgacaatttccatgacgacgtcactctgagaaaccaacggttcattccattcttgaatcccagaacacccaggaagctaacaccttacacggtggtgctgcacggccccgcaggcgtggggaaaaccacgctggccaaaaagtgtatgctggactggacagactgcaacctcagcccgacgctcagatacgcgttctacctcagctgcaaggagctcagccgcatgggcccctgcagttttgcagagctgatctccaaagactggcctgaattgcaggatgacattccaagcatcctagcccaagcacagagaatcctgttcgtggtcgatggccttgatgagctgaaagtcccacctggggcgctgatccaggacatctgcggggactgggagaagaagaagccggtgcccgtcctcctggggagtttgctgaagaggaagatgttacccagggcagccttgctggtcaccacgcggcccagggcactgagggacctccagctcctggcgcagcagccgatctacgtaagggtggagggcttcctggaggaggacaggagggcctatttcctgagacactttggagacgaggaccaagccatgcgtgcctttgagctaatgaggagcaacgcggccctgttccagctgggctcggcccccgcggtgtgctggattgtgtgcacgactctgaagctgcagatggagaagggggaggacccggtccccacctgcctcacccgcacggggctgttcctgcgtttcctctgcagccggttcccgcagggcgcacagctgcggggcgcgctgcggacgctgagcctcctggccgcgcagggcctgtgggcgcagatgtccgtgttccaccgagaggacctggaaaggctcggggtgcaggagtccgacctccgtctgttcctggacggagacatcctccgccaggacagagtctccaaaggctgctactccttcatccacctcagcttccagcagtttctcactgccctgttctacgccctggagaaggaggagggggaggacagggacggccacgcctgggacatcggggacgtacagaagctgctttccggagaagaaagactcaagaaccccgacctgattcaagtaggacacttcttattcggcctcgctaacgagaagagagccaaggagttggaggccacttttggctgccggatgtcaccggacatcaaacaggaattgctgcaatgcaaagcacatcttcatgcaaataagcccttatccgtgaccgacctgaaggaggtcttgggctgcctgtatgagtctcaggaggaggagctggcgaaggtggtggtggccccgttcaaggaaatttctattcacctgacaaatacttctgaagtgatgcattgttccttcagcctgaagcattgtcaagacttgcagaaactctcactgcaggtagcaaagggggtgttcctggagaattacatggattttgaactggacattgaatttgaaaggtgcacttacctaaccattccgaactgggctcggcaggatcttcgctctcttcgcctctggacagatttctgctctctcttcagctcaaacagcaacctcaagtttctggaagtgaaacaaagcttcctgagtgactcttctgtgcggattctttgtgaccacgtaacccgtagcacctgtcatctgcagaaagtggagattaaaaacgtcacccctgacaccgcgtaccgggacttctgtcttgctttcattgggaagaagaccctcacgcacctgaccctggcagggcacatcgagtgggaacgcacgatgatgctgatgctgtgtgacctgctcagaaatcataaatgcaacctgcagtacctgaggttgggaggtcactgtgccaccccggagcagtgggctgaattcttctatgtcctcaaagccaaccagtccctgaagcacctgcgtctctcagccaatgtgctcctggatgagggtgccatgttgctgtacaagaccatgacacgcccaaaacacttcctgcagatgttgtcgttggaaaactgtcgtcttacagaagccagttgcaaggaccttgctgctgtcttggttgtcagcaagaagctgacacacctgtgcttggccaagaaccccattggggatacaggggtgaagtttctgtgtgagggcttgagttaccctgattgtaaactgcagaccttggtgttacagcaatgcagcataaccaagcttggctgtagatatctctcagaggcgctccaagaagcctgcagcctcacaaacctggacttgagtatcaaccagatagctcgtggattgtggattctctgtcaggcattagagaatccaaactgtaacctaaaacacctacgcctctggagctgctccctcatgcctttctattgtcagcatcttggatctgctctcctcagcaatcagaagcttgaaactctggacctgggccagaatcatttgtggaagagtggcataattaagctctttggggttctaagacaaagaactggatccttgaagatactcaggttgaagacctatgaaactaatttggaaatcaagaagctgttggaggaagtgaaagaaaagaatcccaagctgactattgattgcaatgcttccggggcaacggcacctccgtgctgtgactttttttgctgagcagcctgggatcgctctacgaattacacaggaagcgggattcgggtctctaagatgtcttatgaatgcaggtcagagggtcacatgttaacactagagtctgtcgagaggtaggatttgacactggttttctcactatttttgggagattctgcacgagtcacgcacccccttcacatgacgctatgtactttctcacagggataataaagttagagcactctc

SEQ ID NO: 7406 - DNA, 1124 bp, Homo sapiens; identical to SEQ ID NO: 6440

SEQ ID NO: 7407 - DNA, 726 bp, Homo sapiens
attgtattgccacaaagccaggctgatcaccctgggaggcctgggaggtctgagcagctttggattggctgtcaggagcaggactttaacattttactgcacatgggccagccacagcagggttcaattgccagtgcttttatctgcagaaatgtgctgggatgggcactttgtttaaaatttccctttgctactgggaggaaatggaaagcagtaagataacttcatttgtaagagcaatgctaagaagacgtttggtttaaagaattaaaaggaagaacaacttaagagcttcttcaaagtttcccgcatgaaaattacttaaacgttgcacacaacgtttcacaaaatcttttgtgaaagaagaaaaggaaattcagtgtgtgagtctcagcaggagttaagctaatgcagcttaaaataatgccgaaaaagaagcgcttatctgcgggcagagtgcccctgattctcttcctgtgccagatgattagtgcactggaagtacctcttgatctggtacagcctccaaccatcacccaacagtctccaaaagattacattattgaccctcgggagaatattgtaatccagtgtgaagccaaagggaaaccgcccccaagcttttcctggacccgtaatgggactcattttgacatcgataaagaccctctggtcaccatgaagcctggcacaggaacgctcataattaacatcatgagcgaaggg

SEQ ID NO: 7408 - DNA, 659 bp, Homo sapiens
acatgcgtggagaggcactgccttgcgtgtgtgcacacgtgtgaggatgtcagcgcctgtgtggccgcgggactcaaggctggcctggctcaagtgaacagcacgtccaggaggcgacctcgtccgcgggtttgcattctggggtggacgagctgggggttcggtccgagcccggtgggaggctcccggagcgcagcctgggcccagcccaccccgcgccggcggccatggcaggcaccctggacctggacaagggctgcacggtggaggagctgctccgcgggtgcatcgaagccttcgatgactccgggaaggtgcgggacccgcagctggtgcgcatgttcctcatgatgcacccctggtacatcccctcctctcagctggcggccaagctgctccacatctaccaacaatcccggaaggacaactccaattccctgcaggtgaaaacgtgccacctggtcaggtactggatctccgccttcccagcggagtttgacttgaacccggagttggctgagcagatcaaggagctgaaggctctgctagaccaagaagggaaccgacggcacagcagcctaatcgacatagacagcgtgtgcgtgggggagcacagagggctgggggggcactcagtatcctataccatctgtgcttaa

SEQ ID NO: 7409 - DNA, 2339 bp, Homo sapiens
gggaggtggggcatgggaggaccagagacgaagggcttggaaggagacccccacatgcatcatttcctcctcttcacagtgtgctgggagtccagccgtgcactgtgccagatgcctcaggaggagaaccctccccagtgtactgtgaaggatgacacagcacttcttcctaatgacacgcgaccgtcctggtgcctctacatggttgatgcgggcagtgtgggaccctcagttctaggactggtccgcagagaaagcacccaggagcagagcgcttcggagcggtcctcagtggcgccacctgctggtgctaatagggacagccacaggcctcttgcagactggcccaccctgcctacttccctactgacaagttctttggtatttcaaaagggagaaaccactataaaagacaagaggaagggcaggtactaggtgtttcatttccagaattaaaaaaaaaatccatttaagacgtaccactgttttaccggactgaatgggactgtagtgccaagcacagccaggaaatagagaaactgttattatggaagggaatttgttcacatgggaaagcctcattaaatagattctatgtgtgatgtttgagtgaccaatgaaaatagctggcctcagttctgcatggcacactcccaagagcaacagttactattatcacaagcctggtataaataagatagaagcagccctggacccacagccagcaacctgggttattggcccagctctgtctttgtgtgcacatgtcatttggacatcttgtcacctttctaggtcctctgtaaagtgggaaaacagagtggagttggattgaatggtctccaagatcatttccagctctgacctttggtgttctcaggatttgtaaagcagagataggtaaaacacaaaagcagacccacggaccgacctttgtataactttggagtgtggttgctcatgcacatgtgaagtgcaggcagatcaaggttctgtggctttgtctgccctgtccattagagcacaatctggatagaatgccagccaccaagatgcatgaggggcagggtcaccatctcagaaggggaagcacaggaatgtgattgggatggttaaacctctcttctcctccctttgtgctggaacagcagttgaagtttggtcctggagtaattgctgtgatgacttggaaatgcccttggttgctgaggacagctctgtcctgtagtgacagagtgactgcctggctgtggctcttgggttcacagaatccctaatcctccaagcccctaagaggcagggcagggatgctacccacaatatatgcagaaccccagatggagcctgtgggagagagaggaaattaccgtcttcactgtaggcaaaggagaatggctgtgattagccatatatgcctataagaaggagcagagccatactgtccttgtgggttgggagaggggacacagaatccagggcaattgtctgaggtctcaaagtaagttaagccagagtcaaagccaaactccaagtcttggccaaggggatgagaaaagcaaggagctagtcttataggtcaaggaagatgaggtatagttaagagtcatcagtatcacagaacaggccagcagggctttattaggtatgtagaactattataaaccaaggatcttgggagatattaatatctgctggccagacctaaaaaaaactgaaggcccaaggaaagtgactggactcactggaaagtatctaacaaatactttggattccaaagtatttccaataccttgaagattcctttgaaaacatcaaagcacaaactcaaatctgcacaagattacaaaagcacaattttggtgttatttttagaatgcaatacacaaagctatgttcatttctctcagcaagcattttcctgggtagtagtaatagcttaggaatcaaatgccacttttgtttttccttttttcactagtttgaaataccacaaatcacaggtgagtcagtcctcccagaggaaaagacagtcctagggagaatcacaggcctggcagacaagaccacactgagagcagtagaaggaacctgcatgcttaagggacagaggactgtgttgtgttctcataatagaccgctggatgaagaagtggttaaaaaccaaccctcgaaaaacaaaaatccctggctaatcctgaaatatatttaacttgaagtctttggatgatttttttaaggttaaaaaaaagtttaggattattataaatcaatatttataaataagcaacaatgtatttggaatttttgtttacctgattaaatatgtttttggtatgtgt

SEQ ID NO: 7410 - DNA, 801 bp, Homo sapiens
tctggagcccacacccaacatggttggtgactgggagacagaaaaggatagaaaaaaaaaaggctcaggaagacaacaattcaagtcctacccttgtgtgtgcatctcaaggctgtgttcttttaaagaaggagaattctttgaatttcttaaatccgatgtgatggtgaactgcaggcttcggttttcatcatgctgagtcctaacatttgtgactacttcccccggggtggccatgtgaagcatcttatgcgcatgagcctattttatcctcccaacaatattaggaggtatcctcggtccgttttacagatgctgaagatgacccaggttgatacagttaagcagcctagggactccacgtaccccagctgggtctcattgttccagaactgcattagttaagattacccagacttggatttcaaaggaatactttcattgttccgtctgtaacacgaagtaattggggccagctggatgtcaggatgcgtgtggttaccattgtaatcttgctctgcttttgcaaagcggctgagctgcgcaaagcaagcccaggcagtgtgagaagccgagtgaatcatggccgggcgggtggaggccggagaggctccaacccggtcaaacgctacgcaccaggcctcccgtgtgacgtgtacacatatctccatgagaaatacttagattgtcaagaaagaaaattagtttatgtgctgcctggttggcctcaggatttgctgcacatgctgctagcaagaaacaagatccgcacattgaagaacaacatgttttccaagttta

SEQ ID NO: 7411 - DNA, 1452 bp, Homo sapiens
tggtgaactatgacaatgtagtggacacaggttctgaaacagatgaggaagacaagcttcatattgctgaggatgacggtattgccaaccctctggaccaggagacgagtccagctagtgtgcccaaccatgagtcctccccacacgtgagccaagctctgttgccaagagaggaagaggaagatgaaataagggagggtggagtggaacacccctggcacaacaacgagattctacaagcctctgtagatggtccagacctgccacctggaactccagatgcttttgcccaactgctgacctgcccctactgcgaccggggctacaagcgcttgacatcactgaaggagcacatcaagtaccgccacgagaagaatgaagagaacttttcctgccctctctgtagctacacgtttgcctaccgcacccagctcgagcggcatatggtgacacacaagccagggacagatcagcaccaaatgctaacccaaggagcaggtaatcgcaagttcaaatgcacagagtgtggcaaggccttcaaatataaacaccatctgaaagaacacctgcgaattcacagtggaacttgaagtgatgcatgtgtgaatttaagataccgaagtcttaaagtgacctggacgtgaaggaaaaagtaagatgagaaataaagaaagcctttgtaaggtggttttaaaagccttatatgcaaaccttttaatctgtgtttctgcaagtgccatccttgtacagtgttaagagggtaacatgggttacctttgcaccagcttcagtgttaagctcaccctgttctttgaagcacccatgtcagtattagaagaataggcagcagttccttagtttacatatgtttgtgcaattattttctgtacttttttgttcattaattttgtcagtattacaccaaactgtttttgcaacaaaaaaattttttttgcattcatttaattttaggtcaaataacattttatttatgtggctcattttatatttcctaattttatttatttcatactgtagtgtacagtattatagttcttcaatatatagatatattttagtaaaaaaggaacatgacgttgatcatttgggcaaattttacgtaaagagaagagcatttattgtgttttggaacattaattgtgagatgggatttttcaattttattattttatttttgtttttttccaattactggaaattccaaatttgggaacttttgatacgatcttgtgaaaacactgtattttcgactgaaaattccactttcttcatcttgttttttagctaaaaagagggactgttaaatacaatgtatgataccatgacaaaaatctttcctgaattgtctttgtaaaagtattattgaattttcaatttgtaatttcttttgaaaatgaccatgctcgaataaaaatgtagccaaactaagaa

SEQ ID NO: 7412 - DNA, 1260 bp, Homo sapiens
agtgagaattttacactctacctctgctaactgtagagtgtatagacagagctgagaactgctgcctacaccaagaactctcaaacctgagtatgcatcagaacgccctgcaggcttgttaaggcacaaatcactgggccccttccccaaggttctgatcagtaggtgggggtaaggaccaagaattcacatttctaacaagttcccaggagatgctaatgctatggctacgcttggattagattacacagaagggtggttctcaccaggccaagaatggagggaggaacaggcactgtgcacagttggcaaaggcctggggtgaagaacgctgggaaaacttcaaggagctccttgtgcccacagtgctagtgactgtggagattgtgggaaagagtctggggaggcaggttgaggagcagcctctggtgggatccctttgactcttccccaccccactaccaccaacctctggagcagataggtcctgggtctcataccttcactgacccacatccctctgctgcccatgcgatatggccacacaccccaccccatgcctccagagctgtccatgagcagagagcttgaggaacctggggaaggtgggataggtgccctggctgtgggagaaggtcttcaccatgcctgccctgcccatcagccgcatccaggtgagactgggagagcacaacatcgaagtcctggaggggaatgagcagttcatcaatgcagccaagatcatccgccacccccaatacgacaggaagactctgaacaatgacatcatgttaatcaagctctcctcacgtgcagtaatcaacgcccgcgtgtccaccatctctctgcccaccgcccctccagccactggcacgaagtgcctcatctctggctggggcaacactgcgagctctggcgccgactacccagacgagctgcagtgcctggatgctcctgtgctgagccaggctaagtgtgaagcctcctaccctggaaagattaccagcaacatgttctgtgtgggcttccttgagggaggcaaggattcatgtcagggtgattctggtggccctgtggtctgcaatggacagctccaaggagttgtctcctggggtgatggctgtgcccagaagaacaagcctggagtctacaccaaggtctacaactatgtgaaatggattaagaacaccatagctgccaatagctaaagcccccagtatctcttcagtctctataccaataaagtgaccctgttctcac

SEQ ID NO: 7413 - DNA, 861 bp, Homo sapiens
ggtgcttttggcagtgagtattgccttgaattcatggcaatgaattcaatccccaggggctgagagagccagtcgtgggggacagtaagggaggtttttactctttcacctgtccctgaccctgactcctcctcaccccctcctacatttccagggctgaggtagggaggatagttgtgggggtatgactcctctgtcctttgtccccagctctgggagggtctcacggaactagtgacggcgacaggcaactatggcaactaccggcgtcggctggcagcctgtgtgggcttccgcttcccgatcctgggtgtgcacctcaaggacctggtggccctgcagctggcactgcctgactggctggacccagcccggacccggctcaacggggccaagatgaagcagctctttagcatcctggaggagctggccatggtgaccagcctgcggccaccagtacaggccaaccccgacctgctgagcctgctcacggtgtctctggatcagtatcagacggaggatgagctgtaccagctgtccctgcagcgggagccgcgctccaagtcctcgccaaccagccccacgagttgcaccccaccaccccggcccccggtactggaggagtggacctcggctgccaaacccaagctggatcaggccctcgtggtggagcacatcgagaagatggtggaggtgagctcctgcggagcctgagcagtgtgtggggagaggccagtttgccggagcactgccctggaagccagcacgagtgtcctgttcaagacccagcactcagcccctaggagtcacagggcctggcaggccagctgcacggggctgaagtgcccctgggtagggtgg

SEQ ID NO: 7414 - DNA, 3801 bp, Homo sapiens
tatgatctcgtgaaatcttgagagaaactgaatgacgaatgaaactattgttcctgtttcacacagaagaaaactgaggttaaaaggggtaaagtaattttgcatggcatgaagtagaaattcaaagtacaggaatttgaacttggttctgtccttttctgaagcccttgaccactatagactcaaacatcaccttgtttttccactcattcaacacttttttttttaaattatctaataggttggcactcatcatgagcccctgttctcattctgcaaatggtgaagctctctattgtcctgaccccacagttcctgtcccatgaccagggccagctcaccaaggagctgcagcagcatgtaaagtcagtgacatgcccatgcgagtacctgaggaaggttatcaatactctggctgaccatcatcatcgtgggactgactttggtggaagtccttggttacatgtcattattgcgtttccgacaagttataaagttgtcattaccctctggatagtttacctttgggtgtctctcctgaagactatcttctggtctcgaaatggacatgatggatccacggatgtacagcagagagcctggaggtccaaccgccgtagacaggaagggctgaggtccatttgtatgcacacaaagaaaagagtttcttcctttcgaggaaataaaattggcctgaaagacgtcattactctacggagacatgtggaaacaaaagttagagctaaaatccgtaagaggaaggtgacaacgaaaatcaaccatcatgacaaaatcaatggaaagaggaagaccgccagaaaacagaaaatgtttcaacgtgcgcaagagttgcggcggcgagcagaggactaccacaaatgcaaaatccccccttctgcaagaaaggctctttgcaactgggtcagaatggcggcagcggagcatcgtcattcttcaggattgccctactggccctacctcacagctgaaactttaaaaaacaggatgggccaccagccacctcctccaactcaacaacattctataactgataactccctgagcctcaagacacctcccgagtgtctgctcactccccttccaccctcagcggatgataatctcaagacacctcccgagtgtgtgctcactccccttccaccctcagcggatgataatctcaagacacctcccgagtgtgtgctcactccccttccaccctcagcggatgataatctcaagacacctcctgagtgtctgctcactccccttccaccctcagcggatgataatctcaagacacctcccgagtgtctgctcactccccttccaccctcagctctaccctcagctccaccctcagcggatgataatctcaagacacgtgccgagtgtctgctccatccccttccaccctcagcggatgataatctcaagacaccttccgagcgtcagctcactccccttccaccctcagctccaccctcagcagatgataatatcaagacacctgccgagcgtctgcgggggccgcttccaccctcagcggatgataatctcaagacaccttccgagcgtcagctcactccccttccaccctcagctccaccctcagcagatgataatatcaagacacctgctgagcgtctgcgggggccgcttccaccctcagcggatgataatctcaagacaccttccgagcgtcagctcactccccttccaccctcagctccaccctcagcagatgataatatcaagacacctgccgagcgtctgcgggggccgcttccaccctcagcggatgataatctcaagacaccttccgagcgtcagctcactgcccttccaccctcagcagatgataatatcaagacacctgccgagcgtctgcgggggccgcttccaccctcagcggatgataatctcaagacaccttccgagcgtcagctcactccccttccaccctcagctccaccctcagcagatgataatatcaagacacctgccttccaccctcagcggatgatctcaagacaccttccgagcgtcagctcactccccttccaccctcagctccaccctcagcagatgataatatcaagatacctgctgagcgtctgcggattccgcttccaccatcagccgatgataatctcaagacaccttccgagcgtcagctcactccccttccaccctcagctccaccctcagcagatgataatatcaagacacctgccgagcgtctgcgggggccgcttccaccctgagcggatgataatctcaagacaccttccgagcgtcagctcactccccttccaccctcagctccaccctcagcagatgataatatcaagacacctgccgagcgtctgcgggggccgcttccaccctcagcagatgataatctcaagacaccttccgagcgtcagctcactccccttccaccctcagctccaccctcagcagatgataatatcaagacacctgccgagcgtctgcgggggccgcttccaccctcagcggatgataatctcaagacaccttccgagcgtcagctcactccccttccaccctcagctccaccctcagcagatgataatatcaagacacctgccgagcgtctgcgggggccgcttccaccctcagcagatgataatctcaagacaccttccgagcgtcagctcactccccttccaccctcagctccaccctcagcagatgataatatcaagacacctgccgagcgtctgcgggggccgcttccaccctcagcggatgataatctcaagacaccttccgagcgtcagctcactccctttccaccctcagctccaccctcagcagatgataatatcaagacacctgccgagcgtctgcggggagcgtctgcgggggccgcttccaccctcagcggatgataatctcaagacaccttccgagcgtcagctcactccccttccaccctcagctccaccctcagcagatgataatatcaagacacctgccgagcgtctgcgggggccgcttccaccctcagcggatgataatctcaagacaccttccgagcgtcagctcactccccttccaccctcagctccaccctcagcagatgataatatcaagacacctgccgagcgtctgcgggggccgcttccaccctcagcggatgataatctcaagacaccttccgagcgtcagctcactccccttccaccctcagctccaccctcagcagatgataatatcaagacacctgccgagcgtctgcgggggccgcttccaccctcagccgatgataatctcaagacacctcccttagctactcaggaggctgaggcagaaaaaccacgcaaacccaagaggcagagggcggctgagatggaaccacctcccgaacccaagaggcggagggtcggtgacgtggaaccgtcacgcaaacccaagaggcggagggccgctgacgtggaaccatcatcacccgaacccaagaggcggagggtcggtgatgtggaaccgtcacgcaaacccaagaggcggagggccgctgacgtggaaccatcatcacccgaacccaagaggcggagggtcggtgacgtggaaccgtcacgcaaacccaagaggcggagggccgctgacgtggaaccatcattacccgaacccaagaggcggaggttgagctgagaagaggccagtgcactcaagcctgagcaataagaataaaaccgagtagaacaaaataaaaaattcaaaaaacaaaacaaaacccacactccaaaaactaacaaagaataaataaataat

SEQ ID NO: 7415 - DNA, 1718 bp, Homo sapiens
ctggggagagtatatactgaatttagcttctgagacatgatgctcttcctttttaattaacccagaacttagcagcttatctatttctctaatctcaaaacatccttaaactgggggtgatacttgagtgagagaattttgcaggtattaaatgaactatcttcttttttttttttctttgagacagagtcttgctctgtcacccaggctggagtgcagtggcgtgatctcagctcactgcaacctccgcctcccgggttcaagtgattctcctgcctcagcctcctgagtagctgggattacaggtgcgtgccaccgtgcccagctaatttttgtgtttttagtagagacggggtttcaccatgttggccatgctggtcttgaactcctgacctcgtgatctgcccacctcggcctcccaaagtgctggaattataggcgtgagccaccgcgcccagcaaagaacttctaaccttcataacctgacaggtgttctcgaggccagggtctctctttctgtcctttcacgatgctctgcatcccttggatgtgccagtttctgggggaagagtagtcctttgttacatgcatgagtcagtgaacagggaatgggtgaatgacatttgtgggtaggttatttctagaagttaggtgggcagcttggaaggcagaggcacttctacagactattccttggggccacacgtaggttcttgaatcccgaatggaaaggggagattgataactggtgtgtttatgttcttacaagtcttctgccttttaaaatccagtcccaggacatcaaagctctgcagaaagaactcgagcaatttgccaagctcctgaagcagaagaggatcaccctgggatatacacaggccgatgtggggctcaccctgggggttctatttgggaaggtattcagccaaacgaccatctgccgctttgaggctctgcagcttagcttcaagaacatgtgtaagctgcggcccttgctgcagaagtgggtggaggaagctgacaacaatgaaaatcttcaggagatatgcaaagcagaaaccctcgtgcaggcccgaaagagaaagcgaaccagtatcgagaaccgagtgagaggcaacctggagaatttgttcctgcagtgcccgaaacccacactgcagcagatcagccacatcgcccagcagcttgggctcgagaaggatgtggtccgagtgtggttctgtaaccggcgccagaagggcaagcgatcaagcagcgactatgcacaacgagaggattttgaggctgctgggtctcctttctcagggggaccagtgtcctttcctctggccccagggccccattttggtaccccaggctatgggagccctcacttcactgcactgtactcctcggtccctttccctgagggggaagcctttccccctgtctccgtcaccactctgggctctcccatgcattcaaactgaggtgcctgcccttctaggaatgggggacagggggaggggaggagctagggaaagaaaacctggagtttgtgccagggtttttgggattaagttcttcattcactaaggaaggaattgggaacacaaagggtgggggcaggggagtttggggcaactggttggagggaaggtgaagttcaatgatgctcttgattttaatcccacatcatgtatcacttttttcttaaataaagaagcctgggacacagt

SEQ ID NO: 7416 - DNA, 1508 bp, Homo sapiens
tatatgacagtacgtcagcagcgggatggccctagcagtggcggcggctgcagaagcccaagcagccgcggccgcagtggaggctagagccggagcggcggcggcggcggcaccccggggagtttaagatggcggcgggggggacagggggcctgcgggaggagcagcgctatgggctgtcgtgcggacggctggggcaggacaacatcaccgtactgcatgtgaagctcaccgagacggcgatccgggcgctcgagacttaccagagccacaagaatttaattccttttcgaccttcaatccagttccaaggactccacgggcttgtcaaaattcccaaaaatgatcccctcaatgaagttcataactttaacttttatttgtcaaatgtgggcaaagacaaccctcagggcagctttgactgcatccagcaaacattctccagctctggagcctcccagctcaattgcctgggatttatacaagataaaattacagtgtgtgcaacaaacgactcgtatcagatgacacgagaaagaatgacccagattgtaaattctaactccaactcccctagcactccagaaggccgggggactcaagacctacctgttgacagttttagtcaaaacgatagtatctatgaggaccagcaagacaaatatacctctaggacttctctggaaaccttaccccctggttccgttctactaaagtgtccaaagcctatggaagaaaaccattcaatgtctcacaaaaagtccaaaaagaagtctaaaaaacataaggaaaaggaccaaataaaaaagcacgacattgagactattgaggaaaaggaggaagatcttaagagagaagaggaaattgccaagctaaataactccagtccaaattccagtggaggagttaaagaggattgcactgcctccatggaaccttcagcaattgaactcccagattatttgataaaatatatcgctatcgtctcctatgagcaacgccagaattataaggatgacttcaatgcagagtatgatgagtacagagctttgcatgccaggatggagactgtagctagaagatttatcaaactagatgcacaaagaaagcgcctttctccaggctcaaaagagtatcagaatgttcatgaagaagtcttacaagaatatcagaagataaagcagtctagtcccaattaccatgaagaaaaatacagatgtgaatatcttcataacaagctggctcacatcaaaaggctaataggtgaatttgaccaacagcaagcagagtcatggtcctagaactctgcttggaccagaagatgtgaataaacttaagcttatttatttaaaattccaaatgagttgctctagattctaaaaaggtgaaactttggctgttgaaagtttcagtattagtaaacttgagttactttttcttttccattttactttgcttccctgcatttcgaagctgctctttctggtcctccccaccaccccaccccc

SEQ ID NO: 7417 - DNA, 1224 bp, Homo sapiens
attgcgcctctcctgcagtctgattggcaccggctcccattccggctccagcctccaatccgacccccatttcggctgcagcctcggacctagctccggccctcggtctatccggttgcatcctccctccctgttccggaacctgtacgagctgccagtgaacgacggaggctgtatcccccgagcgctgagtacccagacctccgaaagcacaacaactgcatggccagtcacctgaccccagcagtctatgcacggctctgcgacaagaccacacccactggttggacgctagatcagtgtatccagactggcgtggacaaccctggccaccccttcatcaagactgtgggcatggtggctggagatgaggagacctatgaggtatttgctgacctgtttgaccctgtgatccaagagcgacacaatggatatgacccccggacaatgaagcacaccacggatctagatgccagtaaaagtcagaactggccgaagcatccgaggactcagtctgcctccagcttgcactcgagcagagcgacgagaggtggaacgtgttgtggtggatgcactgagtggcctgaagggtgacctggctggacgttactataggctcagtgagatgacagaggctgaacagcagcagcttattgatgaccactttctgtttgataagcctgtgtccccgttgctgactgcagcaggaatggctcgagactggccagatgctcgtggaatttggcacaacaatgagaagagcttcctgatctgggtgaatgaggaggatcatacacgggtgatctccatggagaagggtggtaacatgaagagagtgtttgaaagattctgccgaggcctcaaagaggttagagaagattgtgtaggggagctaggtgggaggacataaggaaaaccaaagagtagcataaatagattatgtaatttatcaaccaacccaagacatgtctgatggtaaaaaggactacctaggactcactctaggactaaaggtataaaccagctgggaccatactgggaaaaccaggacatgtggtcacactaagattaggaaaagagtgtcaggaaccttagaaagtgaagaaggcaggtaatgcaaagaaggaataactgagatggcacgtcagtgcctgggatgtgtgcagtgggatggtgaggtgtgcagataaggaaaacattcgagcttagattgatgttggcggg

SEQ ID NO: 7418 - DNA, 1372 bp, Homo sapiens
ccctctcctccgcccgcccgcctgccactagctcattgcgcctctcctgcagtctgattggcaccggctcccattccggctccagcctccaatccgacccccatttcggctgcagcctcggacctagctccggccctcggtctatccggttgcatcctccctccctgttccggatcttatcttgcgccagcgcctactccaggatcccgtagccagacctcaagccatggctggtcccttctcccgtctgctgtccgcccgcccgggactcaggctcctggctttggccggagcggggtctctagccgctgggtttctgctccgaccggaacctgtacgagctgccagtgaacgacggaggctgtatcccccgaggtatttgctgacctgtttgaccctgtgatccaagagcgacacaatggatatgacccccggacaatgaagcacaccacggatctagatgccagtaaaatccgttctggctactttgatgagaggtatgtattgtcctctagagtcagaactggccgaagcatccgaggactcagtctgcctccagcttgcactcgagcagagcgacgagaggtggaacgtgttgtggtggatgcactgagtggcctgaagggtgacctggctggacgttactataggctcagtgagatgacagaggctgaacagcagcagcttattgatgaccactttctgtttgataagcctgtgtccccgttgctgactgcagcaggaatggctcgagactggccagatgctcgtggaatttggcacaacaatgagaagagcttcctgatctgggtgaatgaggaggatcatacacgggtgatctccatggagaagggtggtaacatgaagagagtgtttgaaagattctgccgaggcctcaaagaggttagagaagactatgtaggggagctaggtgggaggacataaggaaaaccaaagagtagcataaatagattatgtaatttaccaaccaacccaggacatgtcttatagtaaaaaggactatctaggactcactccaggactaaaggtgtaaaccagctgggaccatactgggaaaaccaggacatgtggtcacactaagattaggaaaagaaagagtgtcaggaatcttaggaagtgaacaaggctgttgacagagagtgcaaagaaggaataaatgagatggcacgtcagtgcctgggatgtgtgcagtgggatggtgaggtgtgcagataaggaaaacattcgagcttagattgatgttggcggggagaggttgctgtgttcatgactctaatataaccacccagttctgagacaaggtaggccttgactctggattctatcattcttgttaaagtatcgggtctag

SEQ ID NO: 7419 - DNA, 761 bp, Homo sapiens; identical to SEQ ID NO: 6637

SEQ ID NO: 7420 - DNA, 4327 bp, Homo sapiens
cggggccgtggccgaggcctgcgcgccgcccggccgcctgcactgcgcgcgcgcccaccccgcgtgggaggcagcgggaggggcccggagaggtgtggagcggcgcggcgggaggctccgtgggcggccacgggagacagcgccggcgggagcgcgcctctcggcctttcctccgcgcccccgcgtccccagccggccgctccgagaggacccggaggaggcaggtggctttctagaagatgaccatagaggaccttccagattttccattagaaggaaatcctttgtttggaagatacccatttatattttctgcttctgataccccagttatcttttccatttctgcagcaccaatgccttcagactgtgaattttctttctttgatcctaatgatgcatcatgccaggaaattctttttgatcccaaaacttcagtttcagaattatttgccattttgagacagtgggttcctcaggtccaacaaaacattgacattattggaaatgagattcttaagagaggttgcaatgtgaatgatagagatggattgacagatatgactcttttacattatacctgcaaatctggagctcatggtattggtgatgtggaaacagctgtaaaatttgcaactcagcttattgacctgggagcagacattagtttgcggagtcgctggacaaacatgaatgctttgcattatgctgcttattttgatgtccctgaacttataagagtgattttgaaaacatcgaaaccaaaagatgtggatgccacttgcagtgattttaattttggaacagctttgcatattgcagcatacaacttgtgtgcaggtgctgtgaagtgcctcttggagcagggagcaaatcctgcatttaggaatgacaaaggacagatccctgctgatgttgttccagacccagtagatatgccgttagagatggctgacgccgcagccactgctaaggaaatcaagcagatgcttctagatgcggtgcctctgtcatgtaacatctcaaaggccatgctcccaaattatgatcatgtcactggcaaggcaatgcttacgtcacttggcctgaagttgggggatcgtgttgttattgcaggacagaaggttggtacattaagattttgtggaacaactgaatttgcaagtgggcagtgggctggcattgaactggatgaaccagaaggaaaaaataatggaagtgttggaaaagtccagtactttaaatgtgcccccaagtatggtatttttgcacctctttcaaagataagtaaagcaaaaggtcgaaggaagaatataacacacactccttctacaaaagctgctgtacctctcatcaggtcccagaaaattgacgtagctcatgtgacgtcaaaagtaaatactggattaatgacatcaaaaaaagatagtgcttctgagtcaacactttcattgcctcctggtgaagaacttaaaactgtgacagagaaagatgttgccctgcttggatctgtcagcagctgctcctctacatcttctttggaacacagacagagctaccccaagaaacagaatgcaatcagcagtaacaagaagacaatgagcaaaagcccttccctttcatccagagccagtgctggtatctatggctttttcaaccaggctttcttggtgttttttatcttggtttgtttgtttgaattcctcagcaacatctacagcaatagccgttgcgagggggaactccgcctcggagagagagtgttagtggtaggacagagactgggcaccattaggttctttgggacaacaaacttcgctccaggatattggtatggtatagagcttgaaaaaccccatggcaagaatgatggttcagttggaggtgtgcagtattttagctgttctccaagatatggaatatttgctcccccatccagggtgcaaagagtaacagattccctggataccctttcagaaatttcttcaaataaacagaaccattcttatcctggttttaggagaagttttagcacaacttctgcttcttcccaaaaggagattaacagaagaaatgctttttccaaatcgaaagctgctttgcgtcgcagttggagcagcacccccaccgcaggtggcattgaagggagcgtgaagctgcacgaggggtctcaggtcctgctcacgagctccaatgagatgggtactgttaggtatgtgggccccactgactttgcttcaggtatctggcttggacttgagctccgaagcgccaagggaaaaaatgatgggtcagtgggtgacaagcgctatttcacctgtaagccgaaccatggagtcttagttcgaccgagcagagtgacctatcggggaattaatgggtcaaaacttgtggatgagaattgttaagcttctaaaatattaaataagctcaaatatatatatttggtgtaaataaagagtccatggtaaatggtttactttatttagccatattaaaattttgaaaatatagttatcttcttaaaaaccattataacaattcagagagagttctttacaaagccatgaatatgaactatggggaatcatggttcttttaaagcaattttcaaaataagtaccaattaaagctttaggttccaagaagattctgggactcaggaagaaaaagtgccatcaggtgaccagctgttgcatttcttgcttattctgttttgtttttgcacatcataatggatttttcttagtgccctaattgtgaagggtttctctagctttggttatgtgtaatgttcacgtgacctttttttgtcaatcatttttggaatttttctttctttctgtgctttattactaataagtccaatgagtgagtagtagctagatgactagtatgtagttttatattttggtaaaattatttgccctttcagaaatgcctcatctaaagatacatgataattttggagttggaaggggccttagaggctctccagctctgcttcttgcccattgccaaatactgaaatggaagcccgtcttacctggggtcactaactggttggttaactgagctaagaatagactgtgggtctcctcacttgtggcccagtgctctttctgctatacaaaatgtctaatctcagatttttcttctgctgcttgactgcttcatctggatgaactacaaaaaacccatgattaaggtttatgaattcaagtaataattagattttttttgcacagacttacttaacttccttattggatatgtttgtaacacataaacacaaagcacttttcaaacatgatgcacttttatctttgtgaataatttactgtcctttcctcctgggatatgagaaacattttaaaaaacgtatttaacagaagagagcaaataaagatatatcaggaaggatgtattagttatttacttaaatgtttataatatctggattttttttgttttgttactcatagaactggtgttgtttgctgtttttatttctctaattgttgcagagttctgcctgttacaaagctacagaactgtattgtttttattttccttcttgagcacatgttaacaaactaagcttcacattagagtgatgtcataatgtaaaatgtttgcattgtggttaggtattgaagtttatgtcctgtctgtgtaaagattcatcttttattgtaaatatttagactttaccacagaaatattggaacagtttgctttataagattaaaaagcatccttcagaatggagcttgccttgtgcttagaaataatatgttgaactattttgcaatatactattttaaatctaaattctgtcacttcgctgcctttttaaaatagtgtggtatttcaaatattgctagagctattttcctgaaatacatttgcaaaataaggctgctttgtaatcaaggaatatttttattgattgaaggaaatgactgtactgcgattcaaaagtaaacttattttattatacagattatttcttaaaaactctatttataccttaacatgaaatccatgaccacaccaaacttggttattcataatttttcctgttaaatataaaacactgtaagttaaaaacagtaatgccaacattgaatttatttttgaggtcaaagaaccagttgttctctttatatttagatgaggatgattgagtccatatactatgtatgtttacatatactatacatgcacattaggtgttttcatttgtgttttgcttatgaaatgtcatttaaagttcacttcttgagcatcaataaaaagggaagctgtgtggttttggaatggt

SEQ ID NO: 7421 - DNA, 1123 bp, Homo sapiens; identical to SEQ ID NO: 6694

SEQ ID NO: 7422 - DNA, 641 bp, Homo sapiens
gcgaatcgcagcttctgagaccagggttgctccgtccgtgctccgcctcgccatgacttcctacagctatcgccagtcgtcggccacgtcgtccttcggaggcctgggcggcggctccgtgcgttttgggccgggggtcgcctttcgcgcgcccagcattcacgggggctccggcggccgcggcgtatccgtgtcctccgcccgctttgtgtcctcgtcctcctcgggggcctacggcggcggctacggcggcgtcctgaccgcgtccgacgggctgctggcgggcaacgagaagctaaccatgcagaacctcaacgaccgcctggcctcctacctggacaaggtgcgcgccctggaggcggccaacggcgagctagagattcttggtgccaccattgagaactccaggattgtcctgcagatcgacaatgcccgtctggctgcagatgacttccgaaccaagtttgagacggaacaggctctgcgcatgagcgtggaggccgacatcaacggcctgcgcagggtgctggatgagctgaccctggccaggaccgacctggagatgcagatcgaaggcctgaaggaagagctggcctacctgaagaagaaccatgaggaggaaatcagtacgctgaggggcc

SEQ ID NO: 7423 - DNA, 2397 bp, Homo sapiens
agtgcagcgaggccagcgatgccttctggaccacacgctgtcctcgccgaggtcctggtttgttcctcaacgtcggctgaaggcatcgtcccctgacttcctcttccattcgtccttccgaaaggggacccgactggttcctcttctacatatgaggcgcatctgcttggtgcaaatgtccaagcacctcttctgactcggtgagagtgattttccagtgattgctttggcctgtacaaccagagaacaggattcttcccttctttttggccaccaaatgcctatgtgcaccacacattccagtgtgctgagaagggcagagcttcttggatgatgatggacgtcccaccgggcaggatgaaggcagagcgtgtggcatctccacctcaagggtgcagcctgatcttcctcttctcccttgccagccagcactctgccttctgtatccaccatggtgtttggtgagtttttccatcgccctggacaagacgaggaacttgtcaacctgaatgtggggggctttaagcagtctgttgaccaaagcaccctcctgcggtttcctcacaccagactggggaagctgcttacttgccattctgaagaggccattctggagctgtgtgatgattacagtgtggccgataaggagtactactttgatcggaatccctccttgttcagatatgttttgaatttttattacacggggaagctgcatgtcatggaggagctgtgcgtattctcattctgccaggagatcgagtactggggcatcaacgagctcttcattgattcttgctgcagcaatcgctaccaggaacgcaaggaggaaaaccacgagaaggactgggaccagaaaagccatgatgtgagtaccgactcctcgtttgaagagtcgtctctgtttgagaaagagctggagaagtttgacacactgcgatttggtcagctccggaagaaaatctggattagaatggagaatccagcgtactgcctgtccgctaagcttatcgctatctcctccttgagcgtggtgctggcctccatcgtggccatgtgcgttcacagcatgtcggagttccagaatgaggatggagaagtggatgatccggtgctggaaggagtggagatcgcgtgcattgcctggttcaccggggagcttgccgtccggctggctgccgctccttgtcaaaagaaattctggaaaaaccctctgaacatcattgactttgtctctattattcccttctatgccacgttggctgtagacaccaaggaggaagagagtgaggatattgagaacatgggcaaggtggtccagatcctacggcttatgaggattttccgaattctaaagcttgcccggcactcggtaggacttcggtctctaggtgccacactgagacacagctaccatgaagttgggcttctgcttctcttcctctctgtgggcatttccattttctctgtgcttatctactccgtggagaaagatgaccacacatccagcctcaccagcatccccatctgctggtggtgggccaccatcagcatgacaactgtgggctatggagacacccacccggtcaccttggcgggaaagctcatcgccagcacatgcatcatctgtggcatcttggtggtggcccttcccatcaccatcatcttcaacaagttttccaagtactaccagaagcaaaaggacattgatgtggaccagtgcagtgaggatgcaccagagaagtgtcatgagctaccttactttaacattagggatatatatgcacagcggatgcacaccttcattaccagtctctcttctgtaggcattgtggtgagcgatcctgactccacagatgcttcaagcattgaagacaatgaggacatttgtaacaccacctccttggagaattgcacagcaaaatgagcgggggtgtttgtgcctgtttctcttatcctttcccgacattaggttaacacagctttataaacctcagtgggttcgttaaaatcatttaattctcagggtgtacctttcagccatagttggacattcattgctgaattctgaaatgatagaattgtctttatttttctctgtgaggtcaattaaatgccttgttctgaaatttattttttacaagagagagttgtgatatagtttggaatataagataaatggtattgggtggggtttgtggctacagcttatgcatcattctgtgtttgtcatttactcacattgagctaactttaaattactgacaagtagaatcaaaggtgcagctgactgagacgacatgcatgtaagatccacaaaatgagacaatgcatgtaaatccatgctcatgttctaaacatggaaactaggagcctaataaacttcctaattcagta

SEQ ID NO: 7424 - DNA, 2764 bp, Homo sapiens; identical to SEQ ID NO: 3984

SEQ ID NO: 7425 - DNA, 5123 bp, Homo sapiens
cagactttgagggaagctcactcaggatctgctctccggcaaagtagtaagtgaggtgctgagagcagaatgagctactttgtggattctgctgggagcagccccgtcccttactcagcgcctcgtcctgcagtggtgaggcaaggacctagcaacacttatgaagatcctcgaatgaactgtggtttccagtccaattatcaccagcaaagaccttgctaccccttttgggatgagatggcaactcaggaagttcctactggtcttgaacactgtgtctcagatatggaatgtgcagatgtcccactattaactccaagcagcaaagaaatgatgtctcaagcattaaaagctactttcagtggtttcactaaagaacagcaacgactggggatcccaaaagacccccggcagtggacagaaacccatgttcgggactgggtgatgtgggctgtgaatgaattcagcctgaaaggtgtagacttccagaagttctgtatgaatggagcagccctctgcgccctgggtaaagactgctttctcgagctggccccagactttgttggggacatcttatgggaacatctagagatcctgcagaaagaggatgtgaaaccatatcaagttaatggagtcaacccagcctatccagaatcccgctatacctcggattacttcattagctatggtattgagcatgcccagtgtgttccaccatcggagttctcagagcccagcttcatcacagagtcctatcagacgctccatcccatcagctcggaagagctcctctccctcaagtatgagaatgactacccctcggtcattctccgagaccctctccagacagacaccttgcagaatgactactttgctatcaaacaagaagtcgtcaccccagacaacatgtgcatggggaggaccagtcgtggtaaactcgggggccaggactcttttgaaagcatagagagctacgatagttgtgatcgcctcacccagtcctggagcagccagtcatctttcaacagcctgcagcgtgttccctcctatgacagcttcgactcagaggactatccggctgccctgcccaaccacaagcccaagggcaccttcaaggactatgtgcgggaccgtgctgacctcaataaggacaagcctgtcattcctgctgctgccctagctggctacacaggcagtggaccaatccagctatggcagtttcttctggaattactcactgataaatcctgtcagtcttttatcagctggacaggagatggctgggaattcaaactttctgacccagatgaggtggccaggagatggggaaagaggaaaaacaaacctaagatgaattatgagaaactgagccgtggcctacgctactattacgacaaaaacatcatccacaagacagcggggaaacgctacgtgtaccgctttgtgtgtgacctgcagagcctgctggggtacacccctgaggagctgcacgccatgctggacgtcaagccagatgccgacgagtgatggcactgaaggggctggggaaaccctgctgagaccttccaaggacagccgtgttggttggactctgaattttgaattgttattctattttttattttccagaactcattttttaccttcaggggtgggagctaagtcagttgcagctgtaatcaattgtgcgcagttgggaaaggaaagccaggacttgtggggtgggtgggaccagaaattcttgagcaaattttcaggagagggagaagggccttctcagaagcttgaaggctctggcttaacagagaaagagactaatgtgtccaatcatttttaaaaatcatccatgaaaaagtgtcttgagttgtggacccattagcaagtgacattgtcacatcagaactcatgaaactgatgtaaggcaattaatttgcttctgtttttaggtctgggagggcaaaaaagaggtgggtgggatgaaacatgttttggggggggatgcactgaaaatctgagaactatttacctatcactctagttttgaagcaaagatggacttcagtggggaggggccaaaaccgttgttgtgttaaaatttattttattaaattttgtgccagtattttttttcttaaaaatcgtcttaagctctaaggtggtctcagtattgcaatatcatgtaagtttgtttttatttgccggctgaggattctgtcacaatgaaagaaaactgtttatatagaccccattggaaaagcaaaacgctctcactgagatcagggatcccaaattcatgggacttatataagaaggacaattaatgctgatttgggtacaggggaattatgtgtgtgaatgtcatctacaattaaaaaaaattagcacatccctttacttacttgttatcagtggattctcggggtttggacttaatgttgagctaagaagcattaagtctttgaactgaatgtattttgcatccctggttttggacgacagtaaacgtaggagcactgttgaagtcctggaagggagatcgaaggaggaagattgacttggttctttcttagtcctatatctgtagcatagatgacttggaataaaagctgtatgcatgggcattacccctcaggtcctaagaaataagtcctgaatgcatgtcgttccaaactaacactctgtaatttttcttttatgtcttattttccaagagtcctccattttttgcaccccctcaccgccaactctgttattcagtagagagaagtgtacggctttctgattggtgagtgaaaaagtaacttgagacacgacctaagttgaagagtttagacttgctgagttttagaagtgatggaaattaagagagcatttcaataaaatgtgacttggctgtctttggaagagaagtgcaaggctttcctttgaagaatttaaattagtccggtaggatgtcaggtgagactgtgtatgcaaaatgaatggcacaggtgatgccagggcctcttgcttgggtctgatgtcttggcacagggtaagtgaaggttaattccagaagagaggaatgacttgaaggcaaaggaaactaaggaaggaggttcagtgaggaaaataaggttgtccatgagatttgaatagatttttagttcccccaaggtttaaatacaaacatagtcaagcaaggtagtcatctttctgctggttgtgagggggaatctgaaaatggagttttagaggaaaagtcaacatctaactagtgaggaaaagtgcctaatacaattagaatctccctcactctatagttgcccagttgaaaggataaggaggaggggtggcttttatggacttccatgagagaaggaaagaaatatttcaggtaagcttctcagggctggccctttttgggatttggatgagaaattggaagtactaactactttctagcatatctttaagaaaattgattgttatttactcccagatcctcttgcagacccagaattatcaggaacatagctctgtgattcatgagtgtccccatactgatgaattggagcatccatatggaaagcaaaggcagaattatcccagctgtattattttgatcttttggatgcaggtgccttaatgaagctctcaaaatattttaggagctgctcagggagtgttgggtggaactgtttggactacattgttttctcttagattatgtgatttttgttgggcactggcaaaaggtgtgtgtgtgaatgtgtgcatgtgtgtgaatgttgtgtgtgtgtgtgtgtgtgtgtgtgtgtgtgtgtgtgtgtgtgtttgcagacatgcaaaactgcagctgaaataataccttagatttctaggtaagtctttccacatttcaataatgggtaagagtagaaccagggccgggtatcaattattgcttgctgtttgcaaccaggcataaaatcactttctcaaatcatccaccgttcctattaaatttatgccggaaactctccttctgtgagtataactcctgcagttcctatagcagataagatataagaaagtgcctcctagtgctcctccgcccgcttgtttgctaaaattccctttctctctaagtccaccattttcaagatttgtagatagtgtattagttaagacagctttgtcgatctggccagatgttttttctcctttgtccaaaggccagagaccatcccaggaagagtggtgggtggtttatacactggaaatgttgcgtttatgctttttaaaaacacacgttaacttcagaggaaggatgggcaaatctggtctagctgggtgaaacccttattttcccagagatgccttaacctttgttggttttggctttagggttcagagtcacttttgttcccttctccattctggagagggacttcccctacatagagccctgatttttgtggctgtggggattggaggtagcattcaaagatcagatgtgcttttcctcactttggagatgaacactctgggttttacagcattaacctgcctaaccttcatggtgagaaatacaccatctctcttctagtcatgctgtgcatgccgcttactctgttggggtctatataaatttgttgaactcttacctacattccaaagaagtttcaaggaaccataaatatatgtatacatatacatatataaaatatatatattaaaataaaattatcaggaatactgcctcagttattgaacttttttttttaagaatactttttttttaagctgagaagtatagggatgaaaaagatgttatattgtgtttgactattttccaacttgtattttcatataatttatattttttaaaagctgaaaatttagaagcaagatgaaaaaaaggaaaagcaggtgctttttaaaaatcagaactgaggtagcttagagatgtagcgatgtaagtgtcgatgtttttttaaaaaaaaatgcaaaaaaattcttatggcggagttttttgtttgtttattttagtagctgatgctggcacatcattttgctggagagttttttatatactgtagcctgatttcatattgtattttaaactgtgtgaaattaaaaacaaagaatttcattcataa

SEQ ID NO: 7426 - DNA, 812 bp, Homo sapiens
cgcagccgcggggagcgaggagcgcgcggagccggccatgggcaagtcagcttccaaacagtttcataatgaggtcctgaaggcccacaatgagtaccggcagaagcacggcgtccccccactgaagctctgcaagaacctcaaccgggaggctcaacagtattctgaggccctggccagcacgaggatcctcaagcacagcccggagtccagccgtggccagtgtggggagaaccttgcatgggcatcctatgatcagacaggacacttcacggccatggtatggaagaacaccaagaagatgggcgtggggaaggcgtccgcaagtgacgggtcctcctttgtggtggccagatacttcccagcggggaatgttgtcaatgagggcttcttcgaagaaaacgtcctgccgccgaagaagtaacttgttaaatgtaatgggaaggtggcagacttaagaacgtggatatgaagtgcctagaaccaccacaacctggctgtgcgtctgtccctgtgggtgtatgtgcttgtgtgtgtgatgcatgtgagcgtctctggcacacacacttggacatacagttctgtgtgcgctcattcttattacaggagtgagcaaaggaagcatttaccccgatggttacctagaccacgattatttggattggggggaggggggatccgttttttttttttaattttttgttatttctaagcaaacctcttttgtacttttcttacttctaatatccatccctggactttttgtattccaaatgtttgtgatgctgagaagtgaagttcattttatgtga

SEQ ID NO: 7427 - DNA, 635 bp, Homo sapiens
gagagcgcgcccgggcggccagcgccgagcgcgcggagctggcgtggggagacacggcaggaaaggcgagtcggagtgggtgatgagaggccgggagagcccgtccgagccggagagaccggagagaagggagcgagcgactgtgcggcgctcacgctgccagagcccgggcggagtgcagtcgcctccaaagccttagagcggcgccccagtcactgcagctcttcaccctagagctgtgccctgggaccacagagaccaagagcatggaaatcggctgagaggatatagacctgcagctaactggatttgatttataagagagaaatctgcagtcaatgcccactcttgccacactgctaatatggaaaacagaatgttcaataggatatggtctgataaatagtgatgattgaagatgctgctccaatacatgtgaaatcaatgggagatatctgctgtctgaagatctttcagagcttttctcgacaagctcccctgtaagaaatcggaggtatattctaccattatacagtctttctcaagtggatataaatacgtttgcctcactgtaaccagacaactagacaactaatgtgggaccatggcactgcccagatgcacgtggccaaatt

SEQ ID NO: 7428 - DNA, 1890 bp, Homo sapiens
gaaggataggctgagccggggctcccagcagagacgcctgggtggggcaggaggccgctccaggtgtgagccacagaggaggggagagggacccccacgggagtggaagtggcagagcagctgcagaagtgcagggagcggaaaggtaccagggcagctgctttccgctgcctccggtccgggcagctgcagaaacagcagggggaggagcaacagctgccaaattcgccaactagaggagggagaggcggagcttgggtccctgtagaagccagaggcgcagtctggactgtagtttcccgggagagacgaaagcaggaacgagagcggagcggagcacagtccgccgagcacaagctccagcatcccgtcaggggttgcaggtgtgtgggaggcttgaaactgttacaatatggctttccttggactcttctctttgctggttctgcaaagtatggctacaggggccactttccctgaggaagccattgctgacttgtcagtgaatatgtataatcgtcttagagccactggtgaagatgaaaatattctcttctctccattgagtattgctcttgcaatgggaatgatggaacttggggcccaaggatctacccagaaagaaatccgccactcaatgggatatgacagcctaaaaaatggtgaagaattttctttcttgaaggagttttcaaacatggtaactgctaaagagagccaatatgtgatgaaaattgccaattccttgtttgtgcaaaatggatttcatgtcaatgaggagtttttgcaaatgatgaaaaaatattttaatgcagcagtaaatcatgtggacttcagtcaaaatgtagccgtggccaactacatcaataagtgggtggagaataacacaaacaatctggtgaaagatttggtatccccaagggattttgatgctgccacttatctggccctcattaatgctgtctatttcaaggggaactggaagtcgcagtttaggcctgaaaatactagaaccttttctttcactaaagatgatgaaagtgaagtccaaattccaatgatgtatcagcaaggagaattttattatggggaatttagtgatggctccaatgaagctggtggtatctaccaagtcctagaaataccatatgaaggagatgaaataagcatgatgctggtgctgtccagacaggaagttcctcttgctactctggagccattagtcaaagcacagctggttgaagaatgggcaaactctgtgaagaagcaaaaagtagaagtatacctgcccaggttcacagtggaacaggaaattgatttaaaagatgttttgaaggctcttggaataactgaaattttcatcaaagatgcaaatttgacaggcctctctgataataaggagatttttctttccaaagcaattcacaagtccttcctagaggttaatgaagaaggctcagaagctgctgctgtctcaggaatgattgcaattagtaggatggctgtgctgtatcctcaagttattgtcgaccatccatttttctttcttatcagaaacaggagaactggtacaattctattcatgggacgagtcatgcatcctgaaacaatgaacacaagtggacatgatttcgaagaactttaagttactttatttgaataacaaggaaaacagtaactaagcacattatgtttgcaactggtatatatttaggatttgtgttttacagtatatcttaagataatatttaaaatagttccagataaaaacaatatatgtaaattataagtaacttgtcaaggaatgttatcagtattaagctaatggtcctgttatgtcattgtgtttgtgtgctgttgtttaaaataaaagtacctattgaacatgtg

SEQ ID NO: 7429 - DNA, 651 bp, Homo sapiens
cttggtctccccacggggaaggaaaagattttaagaggagggctttgtaagtggaaaaacagttcccactggccctaaacctagtatttaatgatccacgttccaggcaggaaaatatttttgaagaggcatattttttaggcaatttttcctagatgtttgttaggtttctatacattgagagctttttacaaactatagcaagcagggaaacagaggaaccatcctctctgtcaggacctcgattctccaagagacttgactgctactgaggttcagtcggaaactgccctccttacctggcgacccccccgggcatcagtcaccggttacctgctggtctatgaatcagtggatggcacagtcaaggaagtcattgtgggtccagataccacctcctacagcctggcagacctgagcccatccacccactacacagccaagatccaggcactcaatgggcccctgaggagcaatatgatccagaccatcttcaccacaattggactcctgtaccccttccccaaggactgctcccaagcaatgctgaatggagacacgacctctggcctctacaccatttatctgaatggtgataaggctgaggcgctggaagtcttctgtgacatgacctctgatgggggtggatgg

SEQ ID NO: 7430 - DNA, 3221 bp, Homo sapiens
ttccggccgcggccctggcgcgtggtctgcgcgcgcccggccgtgcgtgcggatgcggggaggctgcgtgtgtgcgcagggagagaacgccggccaccttcccgcttccgagctgggtgcgcgccgagcacaggagattgcctgcgtttaggaggtggctgcgttgtgggaaaagctatcaaggaagaaattgccaaaccatgtctttttttctgttttcagagtagttcacaacagatctgagtgttttaattaagcatggaatacagaaaacaacaaaaaacttaagctttaatttcatctggaattccacagaaccttcggctcgcgtgcttctgagctgctgtggatggcctcggctctctggactgtccttccgagtaggatgtcactgagatccctcaaatggagcctcctgctgctgtcactcctgagtttctttgtgatgtggtacctcagccttccccactacaatgtgatagaacgcgtgaactggatgtacttctatgagtatgagccgatttacagacaagactttcacttcacacttcgagagcattcaaactgctctcatcaaaatccatttctggtcattctggtgacctcccacccttcagatgtgaaagccaggcaggccattagagttacttggggtgaaaaaaagtcttggtggggatatgaggttcttacatttttcttattaggccaagaggctgaaaaggaagacaaaatgttggcattgtccttagaggatgaacaccttctttatggtgacataatccgacaagattttttagacacatataataacctgaccttgaaaaccattatggcattcaggtgggtaactgagttttgccccaatgccaagtacgtaatgaagacagacactgatgttttcatcaatactggcaatttagtgaagtatcttttaaacctaaaccactcagagaagtttttcacaggttatcctctaattgataattattcctatagaggattttaccaaaaaacccatatttcttaccaggagtatcctttcaaggtgttccctccatactgcagtgggttgggttatataatgtccagagatttggtgccaaggatctatgaaatgatgggtcacgtaaaacccatcaagtttgaagatgtttatgtcgggatctgtttgaatttattaaaagtgaacattcatattccagaagacacaaatcttttctttctatatagaatccatttggatgtctgtcaactgagacgtgtgattgcagcccatggcttttcttccaaggagatcatcactttttggcaggtcatgctaaggaacaccacatgccattattaacttcacattctacaaaaagcctagaaggacaggatactttgtggaaagtgttaaataaagtaggtactgtggaaaattcatggggaggtcagtgtgctggcttacactgaactgaaactcatgaaaaacccagactggagactggagggttacacttgtgatttattagtcaggcccttcaaagatgatatgtggaggaattaaatataaaggaattggaggtttttgctaaagaaattaataggaccaaacaatttggacatgtcattctgtagactagaatttcttaaaagggtgttactgagttataagctcactaggctgtaaaaacaaaacaatgtagagttttatttattgaacaatgtagtcacttgaaggttttgtgtatatcttatgtggattaccaatttaaaaatatatgtagttctgtgtcaaaaaacttcttcactgaagttatactgaacaaaattttacctgtttttggtcatttataaagtacttcaagatgttgcagtatttcacagttattattatttaaaattacttcaactttgtgtttttaaatgttttgacgatttcaatacaagataaaaaggatagtgaatcattctttacatgcaaacattttccagttacttaactgatcagtttattattgatacatcactccattaatgtaaagtcataggtcattattgcatatcagtaatctcttggactttgttaaatattttactgtggtaatatagagaagaattaaagcaagaaaatctgaagtattgtcttgtttttaaaaaatacagttcctagtgtttttagaagtcacttaatttgtctcatttttccacctggaaattaggaataatgtagaatgcaaggcagtaatttccttttggaaaggactctgaaggcagaaaagaagggagagaacctcatgggcagaatattataaaaagagtgtcatattccagcatttgaattggaaagagaagagtgaagatccaagttgcattattaatctgccctgtgttttttccttttaacaatcagtttgagctgctgctgttatgagtttctcatcaagatgaaagccctaatatgtaaagtcaaatccgatttaaattttgtgcttttatagaaagaaatttcttcatagacgtggtgatatatcatttgttggacctgctaatagtaggtcaaaggggagcactccttgccccctgttcctgggtttatgcagttttctttttagagtttatatagggcaagtggttctttttctctgaattacaggatggaaaaaggtcatatcctttgtcaggaaatataaacttgaaagtatgtagtcagctcttgtaatactcatatttatgattgtcctatatgaaaaacaacttcagttaaaactataatgtgtgattctgtataacaaggtgatgtctgtttcccagggctcagacctaatccagttataataaaatcaattaaatgaaatattctatagaatcgatctatgcccttgttaatctccatccatataggagtcacgttctttaagacagatggtggtagttatttttgtggcatggttagatttgactggttttgcagaagattacagttatgtactgcataatgacatatacaatagtggtcccataaaattataatggagcagaaaatctattgcctcatgatgttttagccgttttaatgtcatagcctagtgcattactcacgtgtctgtggagatgctggtgtaaacaaacctactacactgccagttgtataaaagtacagcacattcagttatgtacagtatgtaatactgataatgacaataaatgacaccggtttgtgtatttactttttataa

SEQ ID NO: 7431 - DNA, 460 bp, Homo sapiens
tacaaattcaagccctaaatatgagcagctgtccactcgattccaagggtaaagtctgttcgggccatggggtgtgtagtaatgaagccacctgcatttgtgatttcacctgggcagggacagattgcagtatccgggatccagttaggaaccttcacccccccaaggatgaaggacccaaggaaatgtcaagaagagaaggttcgatcctactcagcaaggccccatctgaatcagctgcgctggatggacaccgccttgcactgttggattctgggtatgacatactcgcagcagtgttactggaactattaagtttgtaaacaaaacctttgggtggtaatgactacggagctaaagttggggtgacaaggatggggtaaaagaaaactgtctcttttggaaataatgtcaaagaacacctttcaccacctgtcagtaaacgggggagggggcaaaa

SEQ ID NO: 7432 - DNA, 1514 bp, Homo sapiens
atcatttagtagagcttaaaagtattgccgtagtggttggactttctctttcctttcttaagggaaaaaaaaaattctactggaactatttaagggaaccagtgtgggggagcatgtgtgtgagtgagatcgagcctgcgtgctgccgaagcagggcgccgagtccatgcgaactgccatctgatccgctcttatcaatgaagcagccgatcatggcggatggcccccggtgcaagaggcgcaaacaagccaatcccaggaggaaaaacgtggtgaactatgacaatgtagtggacacaggttctgaaacagatgaggaagacaagcttcatattgctgaggatgacggtattgccaaccctctggaccaggagacgagtccagctagtgtgcccaaccatgagtcctccccacacgtgagccaagctctgttgccaagagaggaagaggaagatgaaataagggagggtggagtggaacacccctggcacaacaacgagattctacaagcctctgtagatggtccagaagaaatgaaggaagactatgacactatggggccagaagccacgatccagaccgcaattaacaatggtacagtgaagaatgcaaattgcacatcagattttgaggaatactttgccaaaagaaaactggaggaacgcgatggtcatgcagtcagcatcgaggagtaccttcagcgcagtgacacagccattatttacccagaagcccctgaggagctgtctcgccttggcacgccagaggccaatgggcaagaagaaaatgacctgccacctggaactccagatgcttttgcccaactgctgacctgcccctactgcgaccggggctacaagcgcttgacatcactgaaggagcacatcaagtaccgccacgagaagaatgaagagaacttttcctgccctctctgtagctacacgtttgcctaccgcacccagctcgagcggcatatggtgacacacaagccagggacagatcagcaccaaatgctaacccaaggagcaggtaatcgcaagttcaaatgcacagagtgtggcaaggccttcaaatataaacaccatctgaaagaacacctgcgaattcacagtggtgaaaaaccttacgagtgcccaaactgcaagaaacgtttctcccattctggttcctacagttcgcacatcagcagcaagaaatgtattggtttaatctctgtaaatggccgaatgagaaacaatatcaagacgggttcttcccctaattctgtttcttcttctcctactaattcagccattacccagttaagaaacaagttggagaatggaaaaccacttagtatgtctgaacagacaggcttacttaaaattaaaacagaaccactagacttcaatgactataaagttcttatggctacacacgggtttagtggcactagtccctttatgaatggtgggcttggagccaccagccctttaggagttcatccatctgctcagagtccaatgcagcactta

SEQ ID NO: 7433 - DNA, 2524 bp, Homo sapiens
ggaaaacggccagcctgaggagctgctgcgagggtccgcttcgtctttcgagagtgactcccgcggtcccaaggctttccagagcgaacctgtgcggctgcaggcaccggcgtgttgagtttccggcgttccgaaggactgagctcttgtcgcggatcccgtccgccgtttccagcccccagtctcagagcggagcccacagagcagggcaccggcatggccaaagccgcggcgatcggcatcgacctgggcaccacctactcctgcgtgggggtgttccaacacggcaaggtggagatcatcgccaacgaccagggcaaccgcaccacccccagctacgtggccttcacggacaccgagcggctcatcggggatgcggccaagaaccaggtggcgctgaacccgcagaacaccgtgtttgacgcgaagcggctgatcggccgcaagttcggcgacccggtggtgcagtcggacatgaagcactggcctttccaggtgatcaacgacggagacaagcccaaggtgcaggtgagctacaagggggagaccaaggcattctaccccgaggagatctcgtccatggtgctgaccaagatgaaggagatcgccgaggcgtacctgggctacccggtgaccaacgcggtgatcaccgtgccggcctacttcaacgactcgcagcgccaggccaccaaggatgcgggtgtgatcgcggggctcaacgtgctgcggatcatcaacgagcccacggccgccgccatcgcctacggcctggacagaacgggcaagggggagcgcaacgtgctcatctttgacctgggcgggggcaccttcgacgtgtccatcctgacgatcgacgacggcatcttcgaggtgaaggccacggccggggacacccacctgggtggggaggactttgacaacaggctggtgaaccacttcgtggaggagttcaagagaaaacacaagaaggacatcagccagaacaagcgagccgtgaggcggctgcgcaccgcctgcgagagggccaagaggaccctgtcgtccagcacccaggccagcctggagatcgactccctgtttgagggcatcgacttctacacgtccatcaccagggcgaggttcgaggagctgtgctccgacctgttccgaagcaccctggagcccgtggagaaggctctgcgcgacgccaagctggacaaggcccagattcacgacctggtcctggtcgggggctccacccgcatccccaaggtgcagaagctgctgcaggacttcttcaacgggcgcgacctgaacaagagcatcaaccccgacgaggctgtggcctacggggcggcggtgcaggcggccatcctgatgggggacaagtccgagaacgtgcaggacctgctgctgctggacgtggctcccctgtcgctggggctggagacggccggaggcgtgatgactgccctgatcaagcgcaactccaccatccccaccaagcagacgcagatcttcaccacctactccgacaaccaacccggggtgctgatccaggtgtacgagggcgagagggccatgacgaaagacaacaatctgttggggcgcttcgagctgagcggcatccctccggcccccaggggcgtgccccagatcgaggtgaccttcgacatcgatgccaacggcatcctgaacgtcacggccacggacaagagcaccggcaaggccaacaagatcaccatcaccaacgacaagggccgcctgagcaaggaggagatcgagcgcatggtgcaggaggcggagaagtacaaagcggaggacgaggtgcagcgcgagagggtgtcagccaagaacgccctggagtcctacgccttcaacatgaagagcgccgtggaggatgaggggctcaagggcaagatcagcgaggcggacaagaagaaggttctggacaagtgtcaagaggtcatctcgtggctggacgccaacaccttggccgagaaggacgagtttgagcacaagaggaaggagctggagcaggtgtgtaaccccatcatcagcggactgtaccagggtgccggtggtcccgggcctggcggcttcggggctcagggtcccaagggagggtctgggtcaggccctaccattgaggaggtggattaggggcctttgttctttagtatgtttgtctttgaggtggactgttgggactcaaggactttgctgctgttttcctatgtcatttctgcttcagctctttgctgcttcacttctttgtaaagttaagttgtaacctgatggtaattagctggcttcattatttttgtagtacaaccgatatgttcattagaattctttgcatttaatgttgatactgtaagggtgtttcgttccctttaaatgaatcaacactgccaccttctgtacgagtttgtttgttttttttttttttttttttttgcttggcgaaaacactacaaaggctgggaatgtatgtttttataatttgtttatttaaatatgaaaaataaaatgttaaactttt

SEQ ID NO: 7434 - DNA, 521 bp, Homo sapiens
agagcgatgagtgagaacgccgcaccaggtctgatctcagagcttctcctgcaaagaggaaccacgaaggtggccacaggtctggttctgaacagagaccagaggctcgcctgggcagagaacagcattgacttcatcagcagggagctgtgtgcgcattccatcaggaagctgcaggcccatgtcctgttgatcaaagcagtccacggatattttgattcaagacagaattactctgagaaggagtccctgtcgttcatgatagacacgatgaaatccaccctcaaagagcagttccagtttgtggaagtcccaggcaatcactgtgtccacatgagcgaaccccagcacgtggccagtatcatcagctccttcttacagtgcacacacatgctcccagcccagctgtagctctgggcctggaactatgaagacctagtgctcccagactcaacactgggactctgagttcctgagccccacaacaaggccagggatggtggggacaggcctcactagtc

SEQ ID NO: 7435 - DNA, 785 bp, Homo sapiens
aaggggcggaggctgggcggcgttgctctgcgctctgcggctgacggcgcttttgtctccgggtccagaggcctttcagaaggagaaggcagctctgtttctctgcagaggagtagggtcctttcagccatgaagcatgtgttgaacctctacctgttaggtgtggtactgaccctactctccatcttcgttagagtgatggagtccctagagggcttactagagagcccatcgcctgggacctcctggaccaccagaagccaactagccaacacagagcccaccaagggccttccagaccatccatccagaagcatgtgataagacctccttccatactggccatattttggaacactgacctagacatgtccagatgggagtcccattcctagcagacaagctgagcaccgttgtaaccagagaactattactaggccttgaagaacctgtctaactggatgctcattgcctgggcaaggcctgtttaggccggttgcggtggctcatgcctgtaatcctagcactttgggaggctgaggtgggtggatcacctgaggtcaggagttcgagaccagcctcgccaacatggcgaaaccccatctctactaaaaatacaaaagttagctgggtgtggtggcagaggcctgtaatcccagctccttgggaggctgaggcgggagaattgcttgaacccggggacggaggttgcagtgagccgagatcgcactgctgtacccagcctgggccacagtgcaagactccatctcaaaaaaaaaagaaaa

SEQ ID NO: 7436 - DNA, 614 bp, Homo sapiens
aaaatattaaatgttaatatattaaattaaaagttagtaagtctctggtttgtgtattccacaaaaatctttagtatactagccacaagctacatttacgtgcacaaggcttcacactgatgttttgttgcatgactttctctgtgaatattgtctgtaaatataagaaattcagtaagaattgtctttttttctacctaagatatatgttcatgttcttgctgagaaaatgtatggaagtaaaattaactaaaagagcatatatgttccagattggaagtgataatgtagtaaatattgtcttttatattccacaaacaggaagagtaattcttcatctaaagccacgacaatgagtgaaaatgatttcaagcacacaaaatcctttataatttaaagactccactttagagatacaccaaagccaccgttgttacacaagttattaaactattataaaactctgctttgtccgacatttgcaaagaggtacacgaggaaatggaattggtatttcattttaattttcatgactactaactcacctgaacttgctattttaaacaaatagttctgtcgacacctaaaatataatctggcttcttgtgtctgga

SEQ ID NO: 7437 - DNA, 2136 bp, Homo sapiens
atgatggcggccctgtacccgagcacggacctctcgggcgcctcctcctcctccctgccttcctctccatcctcttcctcgccgaacgaggtgatggcgctgaaggatgtgcgggaggtgaaggaggagaatacgctgaatgagaagcttttcttgctggcgtgcgacaagggtgactattatatggttaaaaagattttggaggaaaacagttcaggtgacttgaacataaattgcgtagatgtgcttgggagaaatgctgttaccataactattgaaaacgaaaacttggatatactgcagcttcttttggactacggttgtcagaaactaatggaacgaattcagaatcctgagtattcaacaactatggatgttgcacctgtcattttagctgctcatcgtaacaactatgaaattcttacaatgctcttaaaacaggatgtatctctacccaagccccatgcagttggctgtgaatgcacattgtgttctgcaaaaaacaaaaaggatagcctccggcattccaggtttcgtcttgatatatatcgatgtttggccagtccagctctaataatgttaacagaggaggatccaattctgagagcatttgaacttagtgctgatttaaaagaactaagtcttgtggaggtggaattcaggaatgattatgaggaactagcccggcaatgtaaaatgtttgctaaggatttacttgcacaagcccggaattctcgtgaattggaagttattctaaaccatacgtctagtgacgagcctcttgacaaacggggattattagaagaaagaatgaatttaagtcgtctaaaacttgctatcaaatataaccagaaagagtttgtctcccagtctaactgccagcagttcctgaacactgtttggtttggacagatgtcgggttaccgacgcaagcccacctgtaagaagataatgactgttttgacagtaggcatcttttggccagttttgtcactttgttatttgatagctcccaaatctcagtttggcagaatcattcacacaccttttatgaaatttatcattcatggagcatcatatttcacatttctgctgttgcttaatctatactctcttgtctacaatgaggataagaaaaacacaatggggccagcccttgaaagaatagactatcttcttattctgtggattattgggatgatttggtcagacattaaaagactctggtatgaagggttggaagactttttagaagaatctcgtaatcaactcagttttgtcatgaattctctttatttggcaacctttgccctcaaagtggttgctcacaacaagatttcaatgggacagatgttacaagattttggaaaatttcttgggatgtttcttcttgttttgttttctttcacaattggactgacacaactgtatgataaaggatatacttcaaaggagcagaaggactgtgtaggcatcttctgtgaacagcaaagcaatgataccttccattcgttcattggcacctgctttgctttgttctggtatattttctccttagcgcatgtggcaatctttgtcacaagatttagctatggagaagaactgcagtcctttgtgggagctgtcattgttggtacatacaatgtcgtggttgtgattgtgcttaccaaactgctggtggcaatgcttcataaaagctttcagttgatagcaaatcatgaagacaaagaatggaagtttgctcgagcaaaattatggcttagctactttgatgacaaatgtacgttacctccacctttcaacatcattccctcaccaaagactatctgctatatgattagtagcctcagtaagtggatttgctctcatacatcaaaaggcaaggtcaaacggcaaaacagtttaaaggaatggaggaatttgaaacagaagagagatgaaaactatcaaaaagtgatgtgctgcctagtgcatcgttacttgacttccatgagacagaagatgcaaagtacagatcaggcaactgtggaaaatctaaacgaactgcgccaagatctgtcaaaattccgaaatgaaataagggatttacttggctttcggacttctaaatatgctatgttttatccaagaaattaa

SEQ ID NO: 7438 - DNA, 3897 bp, Homo sapiens
aattagccccgcacggcgaggggggaggcgccagttttctggggacactggctgccactgtactcctacccaggggagctcacggagagttggatgaattctgggttgttagctgcggtcagctgggctcccgggagcctgttgctggtggagaacagggggcgcctggccaagggaccagcggcttgctgagactcaacatgacactcctggggtctgagcattccttgctgattaggagcaagttcagatcagttttacagttaagacttcaacaaagaaggacccaggaacaactggctaaccaaggcataataccaccactgaaacgtccagctgaattccatgagcaaagaaaacatttggatagtgacaaggctaaaaattccctgaagcgcaaagccagaaacaggtgcaacagtgccgacttggttaatatgcacatactccaagcttccactgcagagaggtccattccaactgctcagatgaagctgaaaagagcccgactcgccgatgatctcaatgaaaaaattgctctacgaccagggccactggagctggtggaaaaaaacattcttcctgtggattctgctgtgaaagaggccataaaaggtaaccaggtgagtttctccaaatccacggatgcttttgcctttgaagaggacagcagcagcgatgggctttctccggatcagactcgaagtgaagacccccaaaactcagcgggatccccgccagacgctaaagcctcagataccccttcgacaggttctctggggacaaaccaggatcttgcttctggctcagaaaatgacagaaatgactcagcctcacagcccagccaccagtcagatgcggggaagcaggggcttggcccccccagcacccccatagccgtgcatgctgctgtaaagtccaaatccttgggtgacagtaagaaccgccacaaaaagcccaaggaccccaagccaaaggtgaagaagcttaaatatcaccagtacattcccccagaccagaaggcagagaagtcccctccacctatggactcagcctacgctcggctgctccagcaacagcagctgttcctgcagctccaaatcctcagccagcagcagcagcagcagcaacaccgattcagctacctagggatgcaccaagctcagcttaaggaaccaaatgaacagatggtcagaaatccaaactcttcttcaacgccactgagcaatacccccttgtctcctgtcaaaaacagtttttctggacaaactggtgtctcttctttcaaacctcgcccatcagcagccaggtgtgcactgcacagaactcaggagcacacgatggccatcctccaagcttctctccccattcttccagcctccacccgcccttctctggagcccaagcagacagcagtcatggtgccgggggaaacccttgtcccaaaagcccatgtgtacagcaaaagatggctggtttacactcttctgataaggtggggccaaagttttcaattccatccccaactttttctaagtcaagttcagcaatttcagaggtaacacagcctccatcctatgaagatgccgtaaagcagcaaatgacccggagtcagcagatggatgaactcctggacgtgcttattgaaagcggagaaatgccagcagacgctagagaggatcactcatgtcttcaaaaagtcccaaagatacccagatcttcccgaagtccaactgctgtcctcaccaagccctcggcttcctttgaacaagcctcttcaggcagccagatcccctttgatccctatgccaccgacagtgatgagcatcttgaagtcttattaaattcccagagccccctaggaaagatgagtgatgtcacccttctaaaaattgggagcgaagagcctcactttgatgggataatggatggattctctgggaaggctgcagaagacctcttcaatgcacatgagatcttgccaggccccctctctccaatgcagacacagttttcaccctcttctgtggacagcaatgggctgcagttaagcttcactgaatctccctgggaaaccatggagtggctggacctcactccgccaaattccacaccaggctttagcgccctcaccaccagcagccccagcatcttcaacatcgatttcctggatgtcactgatctcaatttgaattcttccatggaccttcacttgcagcagtggtagaatgcccaatgcaccagtgctatggaagaccaatggagttccatgggggaaagcacacagccatacatactttactgtccaaaaacagaagaagaagaagagaattaaaaagaagcaatgatttctgtgccaatgaacaagaacaaaagtcatttttagaaatacatatactgtaatatttaccaacagtcagtaactgttaatgatttcaacaatgcattaaaagaatgtgctttctcagattaaggatgccaaaaaagatatttcactgccttttcaaagaccagtatattttctagcccataatttttctcaggcattgttggggcataagctcacactgtaagcttttctcatgaattcactagacataacgtggaaggaaaacgtagtcttttgggagtacagggaagccagcccctcaaagcttatggaagacatacctgcaatggaagctgttgcccaatgtctccattactatctttcaaaagagaagccagacccagcttcagatcaaaagttcttgagacagaggaacaaaaccaatcgatttccagggaagctaatcaactctcttttccctctaccacaaaactgccctgctggagtggttctgaacctgtacccaggactcgatgtggtcactaataacaattaacctgaactgagtccacagaactccactcggaactttcttcttttttaactagtggcccaatcattcccaccatctctgtgctgataagtacgtgtcctagatgagaaccctgaagaatgcagaccttcttcccccgaaggagatgccacaagctctccaacacagccccctttagttccaaagactagagatgaccacattggtagaagtatatctcgaggcacaggaagggagccccaccagggataattcagacaggactagagaataacatcatttcacataccctgggataaacaccctgggttcctatagaaggactattacttatgggagtccaacttctccttttgttttgttattatcagtttatctttctcccactccacttttccttcaaggtaccaatcctttcctgttcctcgtttggccatctttctttttctgcctccacattgggaggggaggacttctcagttctaacaagctgccatactcctaagaaagccatttttgaaaaatttaacaatccaggttcttctggagaactcattctccacacgcacagtttgctgcaaaaggaagttgcaagaatttcttgaggaagaaactggtgacttggtccatcagtcacgaagttctttctattctcgtttagttttcaagaaattattggtttgtgttgctctggggaaattggaaatcattacattgtaaagacaaatatggatgatatttacaagagagaatttcagatctgggtttttgaaagaaaacagaattgcgcattgaaaacgatggaaggaaaaagacaatggtctaatgtgcattcctcattacctctcgtggctttggctgggagttggaaaaagctaaaatttcagaacagtctctgtaaggctctctgtggctccagttcaccattttatattgttgcatgctgtagaaaggagctattgctgttgttttgtttttttatttaaatcactaaggcactgtttttatcttttgt

SEQ ID NO: 7439 - DNA, 1862 bp, Homo sapiens
gagggattaaagccctaagaggctgtgacacagccatctccaaaaccccactttctccttcctttgagcctccgtaccagctggggcgtccggcaagatgtgagttgtcactctgctgcggcacagacctgaattaacaactctagctagggctgacttcaaaaagcactttcgttttttaataaccaacatcagctcagcaggcttcatttgggaaaagaaaccttgtcggattaccccgacattctccacctcctgggaggccagccattcccaaatgccccaaggatgaagaacggagacggtagacgcaccctctgaagatggtgactccctcctgagaagctggaccccttggtaaaagacaaggccttctccaagaagaatatgaaagtgttactcagacttatttgtttcatagctctactgatttcttctctggaggctgataaatgcaaggaacgtgaagaaaaaataattttagtgtcatctgcaaatgaaattgatgttcgtccctgtcctcttaacccaaatgaacacaaaggcactataacttggtataaagatgacagcaagacacctgtatctacagaacaagcctccaggattcatcaacacaaagagaaactttggtttgttcctgctaaggtggaggattcaggacattactattgcgtggtaagaaattcatcttactgcctcagaattaaaataagtgcaaaatttgtggagaatgagcctaacttatgttataatgcacaagccatatttaagcagaaactacccgttgcaggagacggaggacttgtgtgcccttatatggagttttttaaaaatgaaaataatgagttacctaaattacagtggtataaggattgcaaacctctacttcttgacaatatacactttagtggagtcaaagataggctcatcgtgatgaatgtggctgaaaagcatagagggaactatacttgtcatgcatcctacacatacttgggcaagcaatatcctattacccgggtaatagaatttattactctagaggaaaacaaacccacaaggcctgtgattgtgagcccagctaatgagacaatggaagtagacttgggatcccagatacaattgatctgtaatgtcaccggccagttgagtgacattgcttactggaagtggaatgggtcagtaattgatgaagatgacccagtgctaggggaagactattacagtgtggaaaatcctgcaaacaaaagaaggagtaccctcatcacagtgcttaatatatcggaaattgaaagtagattttataaacatccatttacctgttttgccaagaatacacatggtatagatgcagcatatatccagttaatatatccagtcactaatttccagaagcacatgattggtatatgtgtcacgttgacagtcataattgtgtgttctgttttcatctataaaatcttcaagattgacattgtgctttggtacagggattcctgctatgattttctcccaataaaagcttcagatggaaagacctatgacgcatatatactgtatccaaagactgttggggaagggtctacctctgactgtgatatttttgtgtttaaagtcttgcctgaggtcttggaaaaacagtgtggatataagctgttcatttatggaagggatgactacgttggggaaggtatgtgtgtaatggaacagagtaaaggcttattgttgtaaaactacttagtaaaatgtggattccatctttctagaagatcgtggcataggggtatatgtttcacaattttaagaacctcttcagaagtgtatgatgatttttacatttattaaatgcatttacttctctc

SEQ ID NO: 7440 - DNA, 2464 bp, Homo sapiens
ctctcttgcctgccgccatgtgcctttcgccttctgccgtgattgtgaggcctccccagccatatggaagttcaggatgtctgcccgtggcccggctatcggcatcgacctgggcaccacctattcgtgcgtcggggtcttccaacatggcaaggtggagatcatcgccaacgaccagggcaatcgcaccacccccagctacgtggccttcacggacaccgagcgcctcatcggcgacgccgccaagaaccaggtggccatgaaccccaccaacaccatcttcgacgccaagaggctgattggacggaaattcgaggatgccacagtgcagtcggatatgaaacactggccgttccgggtggtgagcgagggaggcaagcccaaagtgcaagtagagtacaagggggagaccaagaccttcttcccagaggagatatcctccatggtcctcacgaagatgaaggagatcgcggaagcctacctggggggcaaggtgcacagcgcggtcataacggtcccggcctatttcaacgactcgcagcgccaggccaccaaggacgcaggcaccatcacggggctcaatgtgctgcgcatcatcaacgagcccacggcggcggccatcgcctacggcctggacaagaagggctgcgcgggcggcgagaagaacgtgctcatctttgacctgggcggtggcactttcgacgtgtccatcctgaccatcgaggatggcatcttcgaggtgaagtccacggccggcgacacccacctgggcggtgaggacttcgacaaccgcatggtgagccacctggcggaggagttcaagcgcaagcacaagaaggacattgggcccaacaagcgcgccgtgaggcggctgcgcaccgcttgcgagcgcgccaagcgcaccctgagctcgtccacgcaggcgagcatcgagatcgactcgctctacgagggcgtggacttctatacgtccatcacgcgcgcccgcttcgaggagctcaatgccgacctctttcgcgggaccctggagccggtggagaaggcgctgcgcgacgccaagctggacaagggccagatccaggagatcgtgctggtgggcggctccactcgtatccccaagatccagaagctgctgcaggatttcttcaacggcaaggagctgaacaagagcatcaaccccgacgaggcggtggcctatggcgccgcggtgcaggcggccatcctcatcggcgacaaatcagagaatgtgcaggacctgctgctactcgacgtgaccccgttgtcgctgggcatcgagacagctggcggtgtcatgaccccactcatcaagaggaacaccacgatccccaccaagcagacgcagaccttcaccacctactcggacaaccagagcagcgtactggtgcaggtatacgagggcgaacgggccatgaccaaggacaataacctgctgggcaagttcgacctgaccgggattccccctgcgcctcgcggggtcccccaaatcgaggttaccttcgacattgacgccaatggcatccttaacgttaccgccgccgacaagagcaccggtaaggaaaacaaaatcaccatcaccaatgacaaaggtcgtctgagcaaggacgacattgaccggatggtgcaggaggcggagcggtacaaatcggaagatgaggcgaatcgcgaccgagtcgcggccaaaaacgccctggagtcctatacctacaacatcaagcagacggtggaagacgagaaactgaggggcaagattagcgagcaggacaaaaacaagatcctcgacaagtgtcaggaggtgatcaactggctcgaccgaaaccagatggcagagaaagatgagtatgaacacaagcagaaagagctcgaaagagtttgcaaccccatcatcagcaaactttaccaaggtggtcctggcggcggcagcggcggcggcggttcaggagcctccgggggacccaccatcgaagaagtggactaagcttgcactcaagtcagcgtaaacctctttgcctttctctctctctctttttttttgtttgtttctttgaaatgtccttgtgccaagtacgagatctattgttggaagtctttggtatatgcaaatgaaaggagaggtgcaacaacttagtttaattataaaagttccaaagtttgttttttaaaaacattattcgaggtttctctttaatgcattttgcgtgtttgctgacttgagcatttttgattagttcgtgcatggagatttgtttgagatgagaaaccttaagtttgcacacctgttctgtagaagcttggaaacagtaaaatatataggagcttaaattgtttatttttatgtactactttaaaactaaactgaacattgcagtaatgttaaggacaggtatactttttgcaaacaaatgcataaatgcaaatgtaaagtaaagctgaaattgatctcaaa

SEQ ID NO: 7441 - DNA, 665 bp, Homo sapiens
cgccgccgccgccgcccgccgcccctctgccagcagctccggcgccacctcgggccggcgtctccggcgggcgggagccaggcgctgacgggcgcggcgggggcggccgagcgctcctgcggctgcgactcaggctccggcgtctgcgcttccccatggggctggcctgcggcgcctgggcgctctgagattgtcactgctgttccaagggcacacgcagagggatttggaattcctggagagttgcctttgtgagaagctggaaatatttctttcaattccatctcttagttttccataggaacatcaagaaatcatgaacaactttggtaatgaagagtttgactgccacttcctcgatgaaggttttactgccaaggacattctggaccagaaaattaatgaagtttcttcttcttcaaatgtaatgatagcaaagccatcgtgaagacccttgctgctaccgggacaggatttgactgtgctagcaagactgaaatacagttggtgcagagtctgggggtgcctccagagaggattatctatgcaaatccttgtaaacaagtatctcaaattaagtatgctgctaataatggagtccagatgatgacttttgatagtgaagttgagttgatgaaagttgccagagcacatcccaaagcaaa

SEQ ID NO: 7442 - DNA, 1031 bp, Homo sapiens
ttatacagcttataaaaagattcttgttattatcaaatttccctggtgcatttaaaatagaatttgctcaacacacttcagcacatgtacaatgttacaggattggaaggagagggctgcctcagtctggtgcaagtggttggatgtaaacccaaaccaccatctcgtcaaagcccctcagccagacctcccctgcccttgcccactttctctccttccaggctttgctggctcctgtctgccccgcttcagcaccatgcccttcatctactgcaacatcaacgaggtgtgccactatgccaggcgcaatgataaatcttactggctctccactaccgcccctatccccatgatgcccgtcagccagacccagattccccagtacatcagccgctgctctgtgtgtgaggcaccctcgcaagccattgctgtgcacagccaggacatcaccatcccgcagtgccccctgggctggcgcagcctctggattgggtactctttcctcatgcacactgccgctggtgccgagggtggaggccagtccctggtctcacctggctcctgcctagaggactttcgggccactcctttcatcgaatgcagtggtgcccgaggcacctgccactactttgcaaacaagtacagtttctggttgaccacagtggaggagaggcagcagtttggggagttgcctgtgtctgaaacgctgaaagctgggcagctccacactcgagtcagtcgctgccagccaggattcacaggtccaggaatcaaggagtggaagtggaagtggcaccactcaccatcagccccagtgatccaccagcaaaatttttgcttcctgttcccccgacattacgttctgctggcctagagttcttagttccagaggaaggaatgctgccatcaggagacacaacagttccattaaactggaagttaagattgccacctggacactttgggctcctcttccctttacatcaacaggctaataagggagttacagtgttggttggggtgactgactt

SEQ ID NO: 7443 - DNA, 911 bp, Homo sapiens
ccccaaacctgccaccgacggccacttccgtttccccgatagtatttggggatctcgaagcgatacttccggctccccccaggtccccaagctttacttttgtggggcacgacgagaaagtccgcagccccaaacattcccagaggtccacttgggccagtggtactttatcgcaggggcagctcccaccaaggaggagttggcaacttttgaccctgtggacaacattgtcttcaatatggctgctggctctgccccgatgcagctccaccttcgtgctaccatccgcatgaaagatgggctctgtgtgccccggaaatggatctaccacctgactgaagggagcacagatctcagaactgaaggccgccctgacatgaagactgagctcttttccagctcatgcccaggtggaatcatgctgaatgagacaggccagggttaccagcgctttctcctctacaatcgctcaccacatcctcccgaaaagtgtgtggaggaattcaagtccctgacttcctgcctggactccaaagccttcttattgactcctaggaatcaaggtaaggggttaaaatctcataaaacaggattaggactcaccaagtcttctggtgttacagggtgaaagaggctcgtgtgatgtcaccagagggatgtggctaagagctgtgatgtcacctgagggaggcaggatgggttctgggctactcaaaagagaggtttctgagtttgcactggataaagggggcagagggtcatacgtggagggaaaagagccttagagactcccctttgacacagggaatgaaagaacacgttctcccccaccccattactatcaactttgcttttctccctggacttcccttctgtccttctttttccctccccccatcacagaggcctgt

SEQ ID NO: 7444 - DNA, 2389 bp, Homo sapiens
agcgagcgccggcgcctccagcatggagtgggaactcaacttgctgctctacctggcgctcttcttcttcctgctcttcttacttttcctcctgctcttcgtggtcatcaagcagctgaagaactccgtggccaacacggccggggcgctccagcccgggcgcctctcggtgcaccgcgagccttggggcttctcccgagagcaagcggtgtgacccgagtgcgggcactggcgggagggcaccgagctgcgcgggcgctgggctgggtctccgcctcgattctccgtcctcgcggcctcccagcttccagagccgagctgctgcccttgactggtgctcaggggaccacagctgcaatgacagtttgggcctgcaaaaagaaggctggaacaacgggagatggaagctttctgcaaatgcagcaccactggtatccatgaatttaacctgcccatcattcttcctaaacaagagactattgaaaagtcagggtgttcaaaatggcttcagatcttatcaggacaatcttggctgttgcactaatttccaaacttgtaagtgcaatggatctgcagttctacttggcaagataaccattttaagttgaatgagaatgacatcacactcacacctgcaaaatctaaaatgtctaataaagtagattcctatgtctgaacttcaattttagggcacagctgtagatgcagaactgatgccatctggtgcgattctacagaataagagagaaaatttacccagagtgtgccatgcactggcttttctgggaatggcaaggtgccaggatttgtttttggttcgcttgcaggggtggaaacttggaactaggttccaagatggtccccgcagcaccccacaagaagaaggaggaagcccacagagaaaacggggcatgccagttcaaatccacttccttttaaagagcttcctcagcagcccaataacttttgccttcatctcattggccagaactgtgtcattggctactgctatctgcaagattgtctgagaaatgtagtttttgtagctggatatataactgcctttgacaaaaatccagtttctcttgatgaagaagaagatgatggtggatcttgggaggacaactaacattttatgccctggctacagaatacagttgcagaggagcataaagttcaaaaagatcaaaactctagttccttcacaactgtcaaagctccaagcagcactgctcccctctgacagagtgagcagagtgaaggcatgtcaggtgttctcacaaaactcttgacagggctgacctctctcagtcaatatccttgtcccacatcaggattttctagagggccctgggtacctgtgcacttccttggtggccgtaacctctttgtggagggttggtgtaggataaagaatgttctattacgctgctccctcatctgtatcatttctctcctctctaattttcctgtcagttatattttggtggagtctgggtttgtgtatttgattcctatagaaagaccatcgctttcatgcatggaggaggggaatctacgcaaagaaaggctaccttactcctttctgtgactccaccaccagtctaggaatatcctgggagaagaattgcctctcaaagctgcttctataagcagcctacatcctagctaagcaaagaagaaacacttcccacatctagggctgtctaaaagaactttctgtgatgacagaaatgttctatatctgcagtgtccaatatggtaaccatataggcacatgtggctagtgaacacttgaaatgtggctagtgtgactgaggaaggaaaatttaaattttgtttaattgtaattaatttaaattcagatagccaaatggggctactagctattgtgttagatagcacggtatactttattctctttcttgtgttgtagaaccagctgggagaggtgtgggtcagtcatgggcttggtatcccctggtcttcactattctagcttgccattgaatttgtctcccagaggaaaagaaagaatggtatttggaattaaattcaagatgttaacttgacatctatatattgcacatattcctgtatagtgaatggatgacctcctgggaatagttcctgtgactgattttagtgataattgatcatgaagaaatggcagtactgctccacttcaccttcctagtgactattatgtgttcctagtcagagtgactcagcagagattattttgttctcttgtgcaatttattctgtgtcattttatttttgtaatattgtggcagctaaatgattattctgtgtatgtttttcaaaatattaggtggcttatattttttaaaaggctatgaaataaaaataaactatacgtaacaca

SEQ ID NO: 7445 - DNA, 591 bp, Homo sapiens
aatgacaggcggcaggcggtgaccgccgcagggcctgcggagaccgtccgcctggctcgcccgagctcgcccgctgtccgccagcccgcgggagggaggagagaagcgaagcgtttccgcggttggctactcagtgtcttggtctcaagttgcctcattgcggctggcgttcccaatacagacgcatcgtttcttttttaatactccctaagaaagggaataaccttcaagctggcgggagcaatggttcacataaagaaaggcgagctgacccaggaggagaaggagctactggaagtcatcgggaaaggcgtgccccacttccgcagtgctgagtcccagcggggagccccgaggacgagccagaagccatatttccccggagtccccgagtggacgtcccagaggagttccctgccgagtcccgttacctggcaggtactgtccaagaagctggaacattattatccagcaagaatgttcgtgtcaactgtttggacgagaatggaatgactcctctaatgcatgcagcatataaaggaaaactcgatatgtgcaaattactactgcgacatggagccgatgtaaatt

SEQ ID NO: 7446 - DNA, 2785 bp, Homo sapiens
ggaatcggggtttctgggtgacggtgatctcggggtgggcaggactccaaaggcccgtcgacccggtggtggactccttgcactgggattggacatatgcaagcgggagatttggggccggcgctcaaaatcggggggcgggggtggactcgggtttggaccccaggatccgatcagcggacccttgattcaacgtgaggtcccgaattgacgtccttccctcaaaacctccgggtctacaaaccaggaccctcaagacccttcagggctccagcgtgacatggctgaagcgcaccaggccgtgggcttccgaccctcgctgacctcggacggggctgaagtggaactcagtgcccctgtgctgcaggagatctacctctctggcctgcgctcctggaaaaggcatctctcacgtttctggaatgactttctcaccggtgtgtttcctgccagccccctcagttggcttttcctcttcagtgccatccagcttgcctggttcctccagctggatccttccttaggactgatggagaagatcaaagagttgctgcctgactggggtggacaacaccacgggctccggggggtcctggcagccgcgctgtttgcctcgtgtttgtggggagccctgatcttcacactgcacgtggccctgaggctgcttctgtcctaccacggctggcttcttgagccccacggagccatgtcctcccccaccaagacctggctggccctggtccgcatcttctctggccgccacccgatgctgttcagttaccagcgctccctgccacgccagcccgtgccctctgtgcaggacaccgtgcgcaagtacctggagtcggtccggcccatcctctccgacgaggacttcgactggaccgcggtcctggcgcaggaattcctgaggctgcaggcgtcgctgctgcagtggtacctgcggctcaagtcctggtgggcgtccaattatgtcagtgactggtgggaggaatttgtgtacctgcgctcccgaaatccgctgatggtgaacagcaactattacatgatggcagctcgcgctgggaatgccgtccatgccctcctcctgtaccgccaccgcctgaaccgccaggagatacccccgactttgctgatgggaatgcgccccttatgctctgcccagtacgagaagatcttcaacaccacgcggattccaggggtccaaaaagactacatccgccacctccatgacagccaacacgtggctgtcttccaccggggccgattcttccgcatggggacccactcccgaaacagcctgctttccccgagagccctggagcagcagtttcagagaatcctggatgatccctcaccggcctgcccccacgaggaacatctggcagctctgacagctgctcccaggggcacgtgggcccaggtgcggacatccctgaagacccaggcagcggaggccctggaggcggtggaaggggccgctttctttgtgtcactggatgctgagcccgcggggctcaccagggaggacccggcagcgtcgttggatgcctacgcccatgctctgctggccggccggggccatgatcgctggtttgacaaatccttcaccctaatcgtcttctctaacgggaagctgggcctcagcgtggagcactcctgggccgactgccccatctcaggacacatgtgggagttcactctggctacagaatgctttcagctgggctactcaacagacggccactgcaaggggcacccggaccccacactaccccagccccagcggctgcaatgggaccttccagaccagatccactcctccatctctctagccctgaggggagccaagatcttgtctgaaaatgtcgactgccatgtcgttccattctccctatttggcaagagcttcatccgacgctgccacctctcttcagacagcttcatccagatcgccttgcaactggcccacttccgggacaggggtcaattctgcctgacttatgagtcggccatgactcgcttattcctggaaggccggacggagacggtgcggtcttgcacgagggaggcctgcaactttgtcagggccatggaggacaaagagaagacggacccacagtgcctcgccctgttccgcgtggcagtggacaagcaccaggctctgctgaaggcagccatgagcgggcagggagttgaccgccacctgtttgcgctgtacatcgtgtcccgattcctccacctgcagtcgcccttcctgacccaggtccattcggagcagtggcagctgtccaccagccagatccctgttcagcaaatgcatctgtttgacgtccacaattacccggactatgtttcctcaggcggtggattcgggcctgctgatgaccatggttatggtgtttcttatatcttcatgggggatggcatgatcaccttccacatctccagcaaaaaatcaagcacaaaaacggattcccacaggctggggcagcacattgaggacgcactgctggatgtggcctccctgttccaggcgggacagcattttaagcgccggttcagagggtcagggaaggagaactccaggcacaggtgtggatttctctcccgccagactggggcctccaaggcctcaatgacatccaccgacttctgactccttccagcaggcagctggcctctccaaggaataagggtgaaattgccacagctggctgacacaggacaggggcaactggtttggcaaccccacatccaggccaataaagatgtgtgagctggg

SEQ ID NO: 7447 - DNA, 436 bp, Homo sapiens
cgcatgtgcatccccgcctcccgctccaggcgagtccttccctggactccagtcccttgtgggaaacaatccctcgcctccggaggcggcgaggagcggcggaacctaaattggtaataaatcaataagaaatatttacattcactcagtgaaaagtgtcatgtctgagctcagcatatatcggagccacacatggacacctctccttcctccactaagagcggaaaatgaacaaatcccaggaacaagtgtcattcaaggatgtatgtgtggacttcactcaggaagagtggtatctgctggaccctgctcagaagattctatacagagatgtgatcctggaaaattatagcaatcttgtctcagtagggtattgcattactaaaccagaagtgatctttaagatcgagcaaggagaagagccctggatattaga

SEQ ID NO: 7448 - DNA, 3972 bp, Homo sapiens
atggcgagcgactccccggctcgaagcctggatgaaatagatctctcggctctgagggaccccgcagggatctttgaattggtggaacttgttggaaatggaacatacgggcaagtttataagggtcgtcatgtcaaaacgggccagcttgcagccatcaaggttatggatgtcacaggggatgaagaggaagaaatcaaacaagaaattaacatgttgaagaaatattctcatcaccggaatattgctacatactatggtgcttttatcaaaaagaacccaccaggcatggatgaccaactttggttggtgatggagttttgtggtgctggctctgtcaccgacctgatcaagaacacaaaaggtaacacgttgaaagaggagtggattgcatacatctgcagggaaatcttacgggggctgagtcacctgcaccagcataaagtgattcatcgagatattaaagggcaaaatgtcttgctgactgaaaatgcagaagttaaactagtggactttggagtcagtgctcagcttgatcgaacagtgggcaggaggaatactttcattggaactccctactggatggcaccagaagttattgcctgtgatgaaaacccagatgccacatatgatttcaagagtgacttgtggtctttgggtatcaccgccattgaaatggcagaaggtgctccccctctctgtgacatgcaccccatgagagctctcttcctcatcccccggaacccagcgcctcggctgaagtctaagaagtggtcaaaaaaattccagtcatttattgagagctgcttggtaaagaatcacagccagcgaccagcaacagaacaattgatgaagcatccatttatacgagaccaacctaatgagcgacaggtccgcattcaactcaaggaccatattgatagaacaaagaagaagcgaggagaaaaagatgagacagagtatgagtacagtggaagtgaggaagaagaggaggagaatgactcaggagagcccagctccatcctgaatctgccaggggagtcgacgctgcggagggactttctgaggctgcagctggccaacaaggagcgttctgaggccctacggaggcagcagctggagcagcagcagcgggagaatgaggagcacaagcggcagctgctggccgagcgtcagaagcgcatcgaggagcagaaagagcagaggcggcggctggaggagcaacaaaggcgagagaaggagctgcggaagcagcaggagagggagcagcgccggcactatgaggagcagatgcgccgggaggaggagaggaggcgtgcggagcatgaacaggaatataagcgcaaacaattggaagaacagagacaagcagaaagactgcagaggcagctaaagcaagaaagagactacttagtttcccttcagcatcagcggcaggagcagaggcctgtggagaagaagccactgtaccattacaaagaaggaatgagtcctagtgagaagccagcatgggccaaggaggtagaagaacggtcaaggctcaaccggcaaagttcccctgccatgcctcacaaggttgccaacaggatatctgaccccaacctgcccccaaggtcggagtccttcagcattagtggagttcagcctgctcgaacaccccccatgctcagaccagtcgatccccagatcccacatctggtagctgtaaaatcccagggacctgccttgaccgcctcccagtcagtgcacgagcagcccacaaagggcctctctgggtttcaggaggctctgaacgtgacctcccaccgcgtggagatgccacgccagaactcagatcccacctcggaaaatcctcctctccccactcgcattgaaaagtttgaccgaagctcttggttacgacaggaagaagacattccaccaaaggtgcctcaaagaacaacttctatatccccagcattagccagaaagaattctcctgggaatggtagtgctctgggacccagactaggatctcaacccatcagagcaagcaaccctgatctccggagaactgagcccatcttggagagccccttgcagaggaccagcagtggcagttcctccagctccagcacccctagctcccagcccagctcccaaggaggctcccagcctggatcacaagcaggatccagtgaacgcaccagagttcgagccaacagtaagtcagaaggatcacctgtgctcccccatgagcctgcgaaggtgaaaccagaagaatccagggacattacccggcccagtcgaccagctgatctgacggcattagccaaagaactaagagaactccggattgaagaaacaaaccgcccaatgaagaaggtgactgattactcctcctccagtgaggagtcagaaagtagcgaggaagaggaggaagatggagagagcgagacccatgatgggacagtggctgtcagcgacatacccagactgataccaacaggagctccaggcagcaacgagcagtacaatgtgggaatggtggggacgcatgggctggagacctctcatgcggacagtttcagcggcagtatttcaagagaaggaaccttgatgattagagagacgtctggagagaagaagcgatctggccacagtgacagcaatggctttgctggccacatcaacctccctgacctggtgcagcagagccattctccagctggaaccccgactgagggactggggcgcgtctcaacccattcccaggagatggactctgggactgaatatggcatggggagcagcaccaaagcctccttcaccccctttgtggaccccagagtataccagacgtctcccactgatgaagatgaagaggatgaggaatcatcagccgcagctctgtttactagcgaacttcttaggcaagaacaggccaaactcaatgaagcaagaaagatttcggtggtaaatgtaaacccaaccaacattcggcctcatagcgacacaccagaaatcagaaaatacaagaaacgattcaactcagaaatactttgtgcagctctgtggggtgtaaaccttctggtggggactgaaaatggcctgatgcttttggaccgaagtgggcaaggcaaagtctataatctgatcaaccggaggcgatttcagcagatggatgtgctagagggactgaatgtccttgtgacaatttcaggaaagaagaataagctacgagtttactatctttcatggttaagaaacagaatactacataatgacccagaagtagaaaagaaacaaggctggatcactgttggggacttggaaggctgtatacattataaagttgttaaatatgaaaggatcaaatttttggtgattgccttaaagaatgctgtggaaatatatgcttgggctcctaaaccgtatcataaattcatggcatttaagtcttttgcagatctccagcacaagcctctgctagttgatctcacggtagaagaaggtcaaagattaaaggttatttttggttcacacactggtttccatgtaattgatgttgattcaggaaactcttatgatatctacataccatctcatattcagggcaatatcactcctcatgctattgtcatcttgcctaaaacagatggaatggaaatgcttgtttgctatgaggatgagggggtgtatgtaaacacctatggccggataactaaggatgtggtgctccaatggggagaaatgcccacgtctgtggcctacattcattccaatcagataatgggctggggcgagaaagctattgagatccggtcagtggaaacaggacatttggatggagtatttatgcataagcgagctcaaaggttaaagtttctatgtgaaagaaatgataaggtattttttgcatccgtgcgatctggaggaagtagccaagtgtttttcatgaccctcaacagaaattccatgatgaactggtaa

SEQ ID NO: 7449 - DNA, 1909 bp, Homo sapiens; identical to SEQ ID NO: 6563

SEQ ID NO: 7450 - DNA, 878 bp, Homo sapiens
gacctttggcttggcttgtcagggcttgtccaggagttccgctcctctctccaaccggggtccccctccagcgaccctaaagcttcccagacttccgcttcaattcctgtccgcaccccacgcccacctcaacgtggagcgcagtggtctccgaggagcgccggagctgccccgcctgcccagcggggtcagcacttcgcatcaaggcccaagaaaagcaagtcctccagcgttctgagcacccgggcctgagggaaggtcctaacagcccccgggagccagtctccaacgcctcccgcagcagcccgccgctcccaggtgcccgcgtgcgccgctgccgccgcaatcccgcacgcgtcccgcgcccgccccactttgcctatccccgggactaagacgggaatcctgtgaagcagctccagctatgtgtgaagaagaggacagcactgccttggtgtgtgacaatggctctgggctctgtaaggccggctttgctggggacgatgctcccagggctgttttcccatccattgtgggacgtcccagacatcagggggtgatggtgggaatgggacaaaaagacagctacgtgggtgacgaagcacagagcaaaagaggaatcctgaccctgaagtacccgatagaacatggcatcatcaccaactgggacgacatggaaaagatctggcaccactctttctacaatgagcttcgtgttgcccctgaagagcatcccaccctgctcacggaggcacccctgaaccccaaggccaaccgggagaaaatgactcaaattatgtttgagactttcaatgtcccagccatgtatgtggctatccaggcggtgctgtctctctatgcctctggacgcacaactg

SEQ ID NO: 7451 - DNA, 515 bp, Homo sapiens
tagattacagttttactttattggaaagtgaataaaactccagctattaccttattggagtgtctggagggaacagaggaaaatacatgtactccacctaccatgttaaaccagaaggaggtcttgcattctttttgaacagattcattgtgacactaagacttgtatctgtatacctatgcatatatggattgcttttattaacatttgggctgtcacatggtgactgaagaacttcattccataacgtttgaaacacagatctgcctctatggcctgaccatagatttggagaccagctcattgcctgtggtgatgatttccaatgtcagtcagttacctaatgcttgggcatccatcatttggtacaacgtgtcaaccaacgattcccagaacttggttttctttaataatcctccacctgccacattgagtcaactactggaggtgatgagctggcagttttcatcgtacgttggtcgtggtcttaactcagatcaactccatatgctggc

SEQ ID NO: 7452 - DNA, 364 bp, Homo sapiens
atggacttgccagtttcaaaagtttcctgaagtctgaattcagtgaggaaaaccttgagttctggattgcctgtgaggattacaagaagatcaagtcccctgccaagatggctgagaaggcaaagcaaatttatgaagaattcattcaaacggaggctcctaaagagtactctgaaacagaattcccttgaacatgaagacttgaactcatttggaagcataaaattcatgcaacagaagcatagaataagaagaatcacagaggcagatgtaagcagcaccctaatcaatggccaagtgagaagagctctgtcatgtcagtgtctaattgtatgtatcagagacaaaatccaataaacccttg

SEQ ID NO: 7453 - DNA, 2567 bp, Homo sapiens
gctccagcccggcccgacccgaccgcacccggcgcctgccctcgctcggcgtccccggccagccatgggcccttggagccgcagcctctcggcgctgctgctgctgctgcaggtctcctcttggctctgccaggagccggagccctgccaccctggctttgacgccgagagctacacgttcacggtgccccggcgccacctggagagaggccgcgtcctgggcagagtgaattttgaagattgcaccggtcgacaaaggacagcctatttttccctcgacacccgattcaaagtgggcacagatggtgtgattacagtcaaaaggcctctacggtttcataacccacagatccatttcttggtctacgcctgggactccacctacagaaagttttccaccaaagtcacgctgaatacagtggggcaccaccaccgccccccgccccatcaggcctccgtttctggaatccaagcagaattgctcacatttcccaactcctctcctggcctcagaagacagaagagagactgggttattcctcccatcagctgcccagaaaatgaaaaaggcccatttcctaaaaacctggttcagatcaaatccaacaaagacaaagaaggcaaggttttctacagcatcactggccaaggagctgacacaccccctgttggtgtctttattattgaaagagaaacaggatggctgaaggtgacagagcctctggatagagaacgcattgccacatacactctcttctctcacgctgtgtcatccaacgggaatgcagttgaggatccaatggagattttgatcacggtaaccgatcagaatgacaacaagcccgaattcacccaggaggtctttaaggggtctgtcatggaaggtgctcttccaggaacctctgtgatggaggtcacagccacagacgcggacgatgatgtgaacacctacaatgccgccatcgcttacaccatcctcagccaagatcctgagctccctgacaaaaatatgttcaccattaacaggaacacaggagtcatcagtgtggtcaccactgggctggaccgagagagtttccctacgtataccctggtggttcaagctgctgaccttcaaggtgaggggttaagcacaacagcaacagctgtgatcacagtcactgacaccaacgataatcctccgatcttcaatcccaccacgggcttggattttgaggccaagcagcagtacattctacacgtagcagtgacgaatgtggtaccttttgaggtctctctcaccacctccacagccaccgtcaccgtggatgtgctggatgtgaatgaagcccccatctttgtgcctcctgaaaagagagtggaagtgtccgaggactttggcgtgggccaggaaatcacatcctacactgcccaggagccagacacatttatggaacagaaaataacatatcggatttggagagacactgccaactggctggagattaatccggacactggtgccatttccactcgggctgagctggacagggaggattttgagcacgtgaagaacagcacgtacacagccctaatcatagctacagacaatggttctccagttgctactggaacagggacacttctgctgatcctgtctgatgtgaatgacaacgcccccataccagaacctcgaactatattcttctgtgagaggaatccaaagcctcaggtcataaacatcattgatgcagaccttcctcccaatacatctcccttcacagcagaactaacacacggggcgagtgccaactggaccattcagtacaacgacccaacccaagaatctatcattttgaagccaaagatggccttagaggtgggtgactacaaaatcaatctcaagctcatggataaccagaataaagaccaagtgaccaccttagaggtcagcgtgtgtgactgtgaaggggccgctggcgtctgtaggaaggcacagcctgtcgaagcaggattgcaaattcctgccattctggggattcttggaggaattcttgctttgctaattctgattctgctgctcttgctgtttcttcggaggagagcggtggtcaaagagcccttactgcccccagaggatgacacccgggacaacgtttattactatgatgaagaaggaggcggagaagaggaccaggactttgacttgagccagctgcacaggggcctggacgctcggcctgaagtgactcgtaacgacgttgcaccaaccctcatgagtgtcccccggtatcttccccgccctgccaatcccgatgaaattggaaattttattgatgaaaatctgaaagcggctgatactgaccccacagccccgccttatgattctctgctcgtgtttgactatgaaggaagcggttccgaagctgctagtctgagctccctgaactcctcagagtcagacaaagaccaggactatgactacttgaacgaatggggcaatcgcttcaagaagctggctgacatgtacggaggcggcgaggacgactaggggactcgagagaggcgggccccagacccatgtgctg

SEQ ID NO: 7454 - DNA, 688 bp, Homo sapiens
gcccgaggtcggcgggacctgatcgaaggcagcgccgcgtcgaccaccccgggagccggacgcttgggagccccagcccggcagcggcgcccggtcactgaagttgcgccccaactcccagccgcctccaagcttctcgagctaagtttcctgacccctccaagggagtctcacagagctcggtggccctcggccttgccaacgtcactttaactgtttggaactcgtgagcaagaaccgagaagtggagagcccagccggggagttttcagcttttctgtttcacttcgggcttcttctattcaaatggctctgcgctggccaccgaatcctgaatgaggcggggctcctctgccccaactccagcagcgggaacttggttcccctgggcagccgggggcagggggcgccaaggccgtggcgataatgaaggctgagacggccaaggccagcgggtcggcgcggggcactcccgggccggagtggccatcggccggagttcaggaggtctgtgacaagcagggaacaaggcaacggacggcgcaacccagccccggctgacggacgctggcgactcagacatggacagtagctgccacaacgcgactaccaaaatgttagcgactgctccagctcggggcaacatgatgagcacgtccaaacccttggctttctccattgaacgaat

SEQ ID NO: 7455 - DNA, 2476 bp, Homo sapiens
gtgagcgtgtgtgcgtgcgtctactttgtactgggaagaacacagcccatgtgctctgcatggacgttactgatactctgtttagcttgattttcgaaaagcaggcaagatgtccagcacaccacatgaccccttctattcttctcctttcggcccattttataggaggcatacaccatacatggtacagccagagtaccgaatctatgagatgaacaagagactgcagtctcgcacagaggatagtgacaacctctggtgggacgcctttgccactgaattttttgaagatgacgccacattaaccctttcattttgtttggaagatggaccaaagcgatacactatcggcaggaccctcatcccccgttactttagcactgtgtttgaaggaggggtgaccgacctgtattacattctcaaacactcgaaagagtcataccacaactcatccatcacggtggactgcgaccagtgtaccatggtcacccagcacgggaagcccatgtttaccaaggtatgtacagaaggcagactgatcttggagttcacctttgatgatctcatgagaatcaaaacatggcactttaccattagacaataccgagagttagtcccgagaagcatcctagccatgcatgcacaagatcctcaggtcctggatcagctgtccaaaaacatcaccaggatggggctaacaaacttcaccctcaactacctcaggttgtgtgtaatattggagccaatgcaggaactgatgtcgagacataaaacttacaacctcagtccccgagactgcctgaagacctgcttgtttcagaagtggcagaggatggtggctccgccagcagaacccacaaggcaaccaacaaccaaacggagaaaaaggaaaaattccaccagcagcacttccaacagcagcgctgggaacaatgcaaacagcactggcagcaagaagaagaccacagctgcaaacctgagtctgtccagtcaggtacctgggctaggagcgatcccgaactgcagcctcaaccctgggagggatggagacctgtgtcattcaacagcagtgaccccttctggccaatttaaggagaagcattgaggggccctgaaaggagtcacttccagtcctcctcagaggatgtgatggtggtaggagagccaactctgatgggaggtgagtttggggacgaggacgaaaggctaatcactagattagaaaacacgcaatatgatgcggccaacggcatggacgacgaggaggacttcaacaattcacccgcgctggggaacaacagcccgtggaacagtaaacctcccgccactcaagagaccaaatcagaaaaccccccaccccaggcttcccaataagatgatcggcaccagaatccactgtcaataggcccgtgggtgatcattacaattgcaaatctttacttacaggagaggaaacagaagagataaaaacttttccatgcaaatatctatttctaaaccacaatgatctgattttctttcttctttctttttttctaattgagaggattattcccagtaagcttccatgaccctttcttggaggccttcacaggtaatacagatactggcactgattgtaattaaaatgagagaaaactctagcgcatcttctggcacggttttaacaacgtgtttgtgttgaatttcctttttatgcatcaaacgaaggccatattgtccataaatgctcagtgctcaggatctcattaatatgccgaacctaactacagatgactttttaatattgtaaaatattttctgctttttgacttgcatctgagagtttcttgtttcagtaaaaaaagaaaagacaaaaaaatcagctttggaaagtaatttaaatgtaccttattttttttttctttatgttttctttcattgggcaacagctaagagggcccagcaaggtaatttatggttgagctgatgtcaattggttcttgtcttgagtcgactcaatttagcccaagtgctgaaacaagaaatgtcatttttttcatcaaagacaccagggcagatttttaagtaaagaaagacaattggacccttaagaatttatgcatttgtaaagttgctgttgatccaaatattttcaagccatgtaatccattggttttgtgggcagtttaataaacctgaacctttgtgtgttttctaattgtacctgagttgaccatcctttctttttatagtatatttcttgtatgatattttgtaaagctctcacctggttcttttatggggacttttcgtttttgggcaactccagtgtatttatgtgaaactttataagagaattaatttttccatttgcatattaatatgttcctccacacatgtaaaggcacagtggctccgtgtgttaaaaaacagctgtattttatgtatgctttactgataagtgtgccaataataaactgtgttaatgaccaaa

SEQ ID NO: 7456 - DNA, 2354 bp, Homo sapiens
aaacttgttggaactccgggctcgcgcggaggccaggagctgagcggcggcggctgccggacgatgggagcgtgagcaggacggtgataacctctccccgatcgggttgcgagggcgccgggcagaggccaggacgcgagccgccagcggtgggacccatcgacgacttcccggggcgacaggagcagccccgagagccagggcgagcgcccgttccaggtggccggaccgcgcgagcgcctcagcgcggccgctcgctctccccctcgagggacaaacttttcccaaacccgatccgagcccttggaccaaactcgcctgcgccgagagccgtccgcgtagagcgctccgtctccggcgagatgtccgagcgcaaagaaggcagaggcaaagggaagggcaagaagaaggagcgaggctccggcaagaagccggagtccgcggcgggcagccagagcccagccttgcctccccgattgaaagagatgaaaagccaggaatcggctgcaggttccaaactagtccttcggtgtgaaaccagttctgaatactcctctctcagattcaagtggttcaagaatgggaatgaattgaatcgaaaaaacaaaccacaaaatatcaagatacaaaaaaagccagggaagtcagaacttcgcattaacaaagcatcactggctgattctggagagtatatgtgcaaagtgatcagcaaattaggaaatgacagtgcctctgccaatatcaccatcgtggaatcaaacgagatcatcactggtatgccagcctcaactgaaggagcatatgtgtcttcagagtctcccattagaatatcagtatccacagaaggagcaaatacttcttcatctacatctacatccaccactgggacaagccatcttgtaaaatgtgcggagaaggagaaaactttctgtgtgaatggaggggagtgcttcatggtgaaagacctttcaaacccctcgagatacttgtgcaagtgccaacctggattcactggagcaagatgtactgagaatgtgcccatgaaagtccaaaaccaagaaaaggcggaggagctgtaccagaagagagtgctgaccataaccggcatctgcatcgccctccttgtggtcggcatcatgtgtgtggtggcctactgcaaaaccaagaaacagcggaaaaagctgcatgaccgtcttcggcagagccttcggtctgaacgaaacaatatgatgaacattgccaatgggcctcaccatcctaacccaccccccgagaatgtccagctggtgaatcaatacgtatctaaaaacgtcatctccagtgagcatattgttgagagagaagcagagacatccttttccaccagtcactatacttccacagcccatcactccactactgtcacccagactcctagccacagctggagcaacggacacactgaaagcatcctttccgaaagccactctgtaatcgtgatgtcatccgtagaaaacagtaggcacagcagcccaactgggggcccaagaggacgtcttaatggcacaggaggccctcgtgaatgtaacagcttcctcaggcatgccagagaaacccctgattcctaccgagactctcctcatagtgaaaggtatgtgtcagccatgaccaccccggctcgtatgtcacctgtagatttccacacgccaagctcccccaaatcgcccccttcggaaatgtctccacccgtgtccagcatgacggtgtccatgccttccatggcggtcagccccttcatggaagaagagagacctctacttctcgtgacaccaccaaggctgcgggagaagaagtttgaccatcaccctcagcagttcagctccttccaccacaaccccgcgcatgacagtaacagcctccctgctagccccttgaggatagtggaggatgaggagtatgaaacgacccaagagtacgagccagcccaagagcctgttaagaaactcgccaatagccggcgggccaaaagaaccaagcccaatggccacattgctaacagattggaagtggacagcaacacaagctcccagagcagtaactcagagagtgaaacagaagatgaaagagtaggtgaagatacgcctttcctgggcatacagaaccccctggcagccagtcttgaggcaacacctgccttccgcctggctgacagcaggactaacccagcaggccgcttctcgacacaggaagaaatccaggccaggctgtctagtgtaattgctaaccaagaccctattgctgtataaaacctaaataaacacatagattcacctgtaaaactttattttatataataaagtattccaccttaaatt

SEQ ID NO: 7457 - DNA, 8175 bp, Homo sapiens
aggagccgcggcgcgcacagccgggctggagcgcgcacccggcactgaggcttcgctgctctcggagcgctcagaccgcggccgccgcagccggcgaaagaggcaaagtcccgcacgccggaggacatgcgcctcggctagcggccccgggccccaccaccgtgcggctttctccagattattcctctctcgctgtctctgactgtctctctctgtctctgtctctgtctctctctctctcacacacacacacacacacacaaacacacatacgcacgcacgatctcacttcgatctatacactggaggattaaaacaaacaaacaaaaaaaacatttccttcgctccccctccctctccactctgagaagcagaggagccgcacggcgaggggccgcagaccgtctggaaatgcgaatcctaaagcgtttcctcgcttgcattcagctcctctgtgtttgccgcctggattgggctaatggatactacagacaacagagaaaacttgttgaagagattggctggtcctatacaggagcactgaatcaaaaaaattggggaaagaaatatccaacatgtaatagcccaaaacaatctcctatcaatattgatgaagatcttacacaagtaaatgtgaatcttaagaaacttaaatttcagggttgggataaaacatcattggaaaacacattcattcataacactgggaaaacagtggaaattaatctcactaatgactaccgtgtcagcggaggagtttcagaaatggtgtttaaagcaagcaagataacttttcactggggaaaatgcaatatgtcatctgatggatcagagcatagtttagaaggacaaaaatttccacttgagatgcaaatctactgctttgatgcggaccgattttcaagttttgaggaagcagtcaaaggaaaagggaagttaagagctttatccattttgtttgaggttgggacagaagaaaatttggatttcaaagcgattattgatggagtcgaaagtgttagtcgttttgggaagcaggctgctttagatccattcatactgttgaaccttctgccaaactcaactgacaagtattacatttacaatggctcattgacatctcctccctgcacagacacagttgactggattgtttttaaagatacagttagcatctctgaaagccagttggctgttttttgtgaagttcttacaatgcaacaatctggttatgtcatgctgatggactacttacaaaacaattttcgagagcaacagtacaagttctctagacaggtgttttcctcatacactggaaaggaagagattcatgaagcagtttgtagttcagaaccagaaaatgttcaggctgacccagagaattataccagccttcttgttacatgggaaagacctcgagtcgtttatgataccatgattgagaagtttgcagttttgtaccagcagttggatggagaggaccaaaccaagcatgaatttttgacagatggctatcaagacttgggtgctattctcaataatttgctacccaatatgagttatgttcttcagatagtagccatatgcactaatggcttatatggaaaatacagcgaccaactgattgtcgacatgcctactgataatcctgaacttgatcttttccctgaattaattggaactgaagaaataatcaaggaggaggaagagggaaaagacattgaagaaggcgctattgtgaatcctggtagagacagtgctacaaaccaaatcaggaaaaaggaaccccagatttctaccacaacacactacaatcgcatagggacgaaatacaatgaagccaagactaaccgatccccaacaagaggaagtgaattctctggaaagggtgatgttcccaatacatctttaaattccacttcccaaccagtcactaaattagccacagaaaaagatatttccttgacttctcagactgtgactgaactgccacctcacactgtggaaggtacttcagcctctttaaatgatggctctaaaactgttcttagatctccacatatgaacttgtcggggactgcagaatccttaaatacagtttctataacagaatatgaggaggagagtttattgaccagtttcaagcttgatactggagctgaagattcttcaggctccagtcccgcaacttctgctatcccattcatctctgagaacatatcccaagggtatatattttcctccgaaaacccagagacaataacatatgatgtccttataccagaatctgctagaaatgcttccgaagattcaacttcatcaggttcagaagaatcactaaaggatccttctatggagggaaatgtgtggtttcctagctctacagacataacagcacagcccgatgttggatcaggcagagagagctttctccagactaattacactgagatacgtgttgatgaatctgagaagacaaccaagtccttttctgcaggcccagtgatgtcacagggtccctcagttacagatctggaaatgccacattattctacctttgcctacttcccaactgaggtaacacctcatgcttttaccccatcctccagacaacaggatttggtctccacggtcaacgtggtatactcgcagacaacccaaccggtatacaatggtgagacacctcttcaaccttcctacagtagtgaagtctttcctctagtcacccctttgttgcttgacaatcagatcctcaacactacccctgctgcttcaagtagtgattcggccttgcatgctacgcctgtatttcccagtgtcgatgtgtcatttgaatccatcctgtcttcctatgatggtgcacctttgcttccattttcctctgcttccttcagtagtgaattgtttcgccatctgcatacagtttctcaaatccttccacaagttacttcagctaccgagagtgataaggtgcccttgcatgcttctctgccagtggctgggggtgatttgctattagagcccagccttgctcagtattctgatgtgctgtccactactcatgctgcttcagagacgctggaatttggtagtgaatctggtgttctttataaaacgcttatgttttctcaagttgaaccacccagcagtgatgccatgatgcatgcacgttcttcagggcctgaaccttcttatgccttgtctgataatgagggctcccaacacatcttcactgtttcttacagttctgcaatacctgtgcatgattctgtgggtgtaacttatcagggttccttatttagcggccctagccatataccaatacctaagtcttcgttaataaccccaactgcatcattactgcagcctactcatgccctctctggtgatggggaatggtctggagcctcttctgatagtgaatttcttttacctgacacagatgggctgacagcccttaacatttcttcacctgtttctgtagctgaatttacatatacaacatctgtgtttggtgatgataataaggcgctttctaaaagtgaaataatatatggaaatgagactgaactgcaaattccttctttcaatgagatggtttacccttctgaaagcacagtcatgcccaacatgtatgataatgtaaataagttgaatgcgtctttacaagaaacctctgtttccatttctagcaccaagggcatgtttccagggtcccttgctcataccaccactaaggtttttgatcatgagattagtcaagttccagaaaataacttttcagttcaacctacacatactgtctctcaagcatctggtgacacttcgcttaaacctgtgcttagtgcaaactcagagccagcatcctctgaccctgcttctagtgaaatgttatctccttcaactcagctcttattttatgagacctcagcttcttttagtactgaagtattgctacaaccttcctttcaggcttctgatgttgacaccttgcttaaaactgttcttccagctgtgcccagtgatccaatattggttgaaacccccaaagttgataaaattagttctacaatgttgcatctcattgtatcaaattctgcttcaagtgaaaacatgctgcactctacatctgtaccagtttttgatgtgtcgcctacttctcatatgcactctgcttcacttcaaggtttgaccatttcctatgcaagtgagaaatatgaaccagttttgttaaaaagtgaaagttcccaccaagtggtaccttctttgtacagtaatgatgagttgttccaaacggccaatttggagattaaccaggcccatcccccaaaaggaaggcatgtatttgctacacctgttttatcaattgatgaaccattaaatacactaataaataagcttatacattccgatgaaattttaacctccaccaaaagttctgttactggtaaggtatttgctggtattccaacagttgcttctgatacatttgtatctactgatcattctgttcctataggaaatgggcatgttgccattacagctgtttctccccacagagatggttctgtaacctcaacaaagttgctgtttccttctaaggcaacttctgagctgagtcatagtgccaaatctgatgccggtttagtgggtggtggtgaagatggtgacactgatgatgatggtgatgatgatgatgatgacagaggtagtgatggcttatccattcataagtgtatgtcatgctcatcctatagagaatcacaggaaaaggtaatgaatgattcagacacccacgaaaacagtcttatggatcagaataatccaatctcatactcactatctgagaattctgaagaagataatagagtcacaagtgtatcctcagacagtcaaactggtatggacagaagtcctggtaaatcaccatcagcaaatgggctatcccaaaagcacaatgatggaaaagaggaaaatgacattcagactggtagtgctctgcttcctctcagccctgaatctaaagcatgggcagttctgacaagtgatgaagaaagtggatcagggcaaggtacctcagatagccttaatgagaatgagacttccacagatttcagttttgcagacactaatgaaaaagatgctgatgggatcctggcagcaggtgactcagaaataactcctggattcccacagtccccaacatcatctgttactagcgagaactcagaagtgttccacgtttcagaggcagaggccagtaatagtagccatgagtctcgtattggtctagctgaggggttggaatccgagaagaaggcagttataccccttgtgatcgtgtcagccctgacttttatctgtctagtggttcttgtgggtattctcatctactggaggaaatgcttccagactgcacacttttacttagaggacagtacatcccctagagttatatccacacctccaacacctatctttccaatttcagatgatgtcggagcaattccaataaagcactttccaaagcatgttgcagatttacatgcaagtagtgggtttactgaagaatttgagacactgaaagagttttaccaggaagtgcagagctgtactgttgacttaggtattacagcagacagctccaaccacccagacaacaagcacaagaatcgatacataaatatcgttgcctatgatcatagcagggttaagctagcacagcttgctgaaaaggatggcaaactgactgattatatcaatgccaattatgttgatggctacaacagaccaaaagcttatattgctgcccaaggcccactgaaatccacagctgaagatttctggagaatgatatgggaacataatgtggaagttattgtcatgataacaaacctcgtggagaaaggaaggagaaaatgtgatcagtactggcctgccgatgggagtgaggagtacgggaactttctggtcactcagaagagtgtgcaagtgcttgcctattatactgtgaggaattttactctaagaaacacaaaaataaaaaagggctcccagaaaggaagacccagtggacgtgtggtcacacagtatcactacacgcagtggcctgacatgggagtaccagagtactccctgccagtgctgacctttgtgagaaaggcagcctatgccaagcgccatgcagtggggcctgttgtcgtccactgcagtgctggagttggaagaacaggcacatatattgtgctagacagtatgttgcagcagattcaacacgaaggaactgtcaacatatttggcttcttaaaacacatccgttcacaaagaaattatttggtacaaactgaggagcaatatgtcttcattcatgatacactggttgaggccatacttagtaaagaaactgaggtgctggacagtcatattcatgcctatgttaatgcactcctcattcctggaccagcaggcaaaacaaagctagagaaacaattccagctcctgagccagtcaaatatacagcagagtgactattctgcagccctaaagcaatgcaacagggaaaagaatcgaacttcttctatcatccctgtggaaagatcaagggttggcatttcatccctgagtggagaaggcacagactacatcaatgcctcctatatcatgggctattaccagagcaatgaattcatcattacccagcaccctctccttcataccatcaaggatttctggaggatgatatgggaccataatgcccaactggtggttatgattcctgatggccaaaacatggcagaagatgaatttgtttactggccaaataaagatgagcctataaattgtgagagctttaaggtcactcttatggctgaagaacacaaatgtctatctaatgaggaaaaacttataattcaggactttatcttagaagctacacaggatgattatgtacttgaagtgaggcactttcagtgtcctaaatggccaaatccagatagccccattagtaaaacttttgaacttataagtgttataaaagaagaagctgccaatagggatgggcctatgattgttcatgatgagcatggaggagtgacggcaggaactttctgtgctctgacaacccttatgcaccaactagaaaaagaaaattccgtggatgtttaccaggtagccaagatgatcaatctgatgaggccaggagtctttgctgacattgagcagtatcagtttctctacaaagtgatcctcagccttgtgagcacaaggcaggaagagaatccatccacctctctggacagtaatggtgcagcattgcctgatggaaatatagctgagagcttagagtctttagtttaacacagaaaggggtgggggaactcacatctgagcattgttttcctcttcctaaaattaggcaggaaaatcagtctagttctgttatctgttgatttcccatcacctgacagtaactttcatgacataggattctgccgccaaatttatatcattaacaatgtgtgcctttttgcaagacttgtaatttacttattatgtttgaactaaaatgattgaattttacagtatttctaagaatggaattgtggtatttttttctgtattgattttaacagaaaatttcaatttatagaggttaggaattccaaactacagaaaatgtttgtttttagtgtcaaatttttagctgtatttgtagcaattatcaggtttgctagaaatataacttttaatacagtagcctgtaaataaaacactcttccatatgatattcaacattttacaactgcagtattcacctaaagtagaaataatctgttacttattgtaaatactgccctagtgtctccatggaccaaatttatatttataattgtagatttttatattttactactgagtcaagttttctagttctgtgtaattgtttagtttaatgacgtagttcattagctggtcttactctaccagttttctgacattgtattgtgttacctaagtcattaactttgtttcagcatgtaattttaacttttgtggaaaatagaaataccttcattttgaaagaagtttttatgagaataacaccttaccaaacattgttcaaatggtttttatccaaggaattgcaaaaataaatataaatattgccattaa

SEQ ID NO: 7458 - DNA, 588 bp, Homo sapiens
aaggcaaaatcacaggaaaagttccaggagaccataccttccttctccggagtcttccaacaggagaagaggacaaagatactcagagagaaaaagtaaaagaccgaagaaggaggctggagagaccaggatccttccagctgaacaaagtcagccacaaagcagactagccagccggctacaattggagtcagagtcccaaagacatgggcttgttagagtgctgtgcaagatgtctggtaggggccccctttgcttccctggtggccactggattgtgtttctttggggtggcactgttctgtggctgtggacatgaagccctcactggcacagaaaagctaattgagacctatttctccaaaaactaccaagactatgagtatctcatcaatgtgatccatgccttccagtatgtcatctatggaactgcctctttcttcttcctttatggggccctcctgctggctgagggcttctacaccaccggcgcagtcaggcagatctttggcgactacaagaccaccatctgcggcaagggcctgagcgcaacggtaacagggggccagaaggggaggggttccagag

SEQ ID NO: 7459 - DNA, 3666 bp, Homo sapiens
cctgctgccgcctgggccccgccgagcggagctagcgccgcgcgcagagcacacgctcgcgctccagctcccctcctgcgcggttcatgactgtgtcccctgaccgcagcctctgcgagcccccgccgcaggaccacggcccgctccccgccgccgcgagggccccgagcgaaggaaggaagggaggcgcgctgtgcgccccgcggagcccgcgaaccccgctcgctgccggctgcccagcctggctggcaccatgctgcccgcgcgctgcgcccgcctgctcacgccccacttgctgctggtgttggtgcagctgtcccctgctcgcggccaccgcaccacaggccccaggtttctaataagtgaccgtgacccacagtgcaacctccactgctccaggactcaacccaaacccatctgtgcctctgatggcaggtcctacgagtccatgtgtgagtaccagcgagccaagtgccgagacccgaccctgggcgtggtgcatcgaggtagatgcaaagatgctggccagagcaagtgtcgcctggagcgggctcaagccctggagcaagccaagaagcctcaggaagctgtgtttgtcccagagtgtggcgaggatggctcctttacccaggtgcagtgccatacttacactgggtactgctggtgtgtcaccccggatgggaagcccatcagtggctcttctgtgcagaataaaactcctgtatgttcaggttcagtcaccgacaagcccttgagccagggtaactcaggaaggaaagatgacgggtctaagccgacacccacgatggagacccagccggtgttcgatggagatgaaatcacagccccaactctatggattaaacacttggtgatcaaggactccaaactgaacaacaccaacataagaaattcagagaaagtctattcgtgtgaccaggagaggcagagtgccctggaagaggcccagcagaatccccgtgagggtattgtcatccctgaatgtgcccctgggggactctataagccagtgcaatgccaccagtccactggctactgctggtgtgtgctggtggacacagggcgcccgctgcctgggacctccacacgctacgtgatgcccagttgtgagagcgacgccagggccaagactacagaggcggatgaccccttcaaggacagggagctaccaggctgtccagaagggaagaaaatggagtttatcaccagcctactggatgctctcaccactgacatggttcaggccattaactcagcagcgcccactggaggtgggaggttctcagagccagaccccagccacaccctggaggagcgggtagtgcactggtatttcagccagctggacagcaatagcagcaacgacattaacaagcgggagatgaagcccttcaagcgctacgtgaagaagaaagccaagcccaagaaatgtgcccggcgtttcaccgactactgtgacctgaacaaagacaaggtcatttcactgcctgagctgaagggctgcctgggtgttagcaaagaaggacgcctcgtctaaggagcagaaaacccaagggcaggtggagagtccagggaggcaggatggatcaccagacacctaaccttcagcgttgcccatggccctgccacatcccgtgtaacataagtggtgcccaccatgtttgcacttttaataactcttacttgcgtgttttgtttttggtttcattttaaaacaccaatatctaataccacagtgggaaaaggaaagggaagaaagactttattctctctcttattgtaagtttttggatctgctactgacaacttttagagggttttgggggggtgggggagggtgttgttggggctgagaagaaagagatttatatgctgtatataaatatatatgtaaattgtatagttcttttgtacaggcattggcattgctgtttgtttatttctctccctctgcctgctgtgggtggtgggcactctggacacatagtccagctttctaaaatccaggactctatcctgggcctactaaacttctgtttggagactgacccttgtgtataaagacgggagtcctgcaattgtactgcggactccacgagttcttttctggtgggaggactatattgccccatgccattagttgtcaaaattgataagtcacttggctctcggccttgtccagggaggttgggctaaggagagatggaaactgccctgggagaggaagggagtccagatcccatgaatagcccacacaggtaccggctctcagagggtccgtgcattcctgctctccggacccccaaagggcccagcattggtgggtgcaccagtatcttagtgaccctcggagcaaattatccacaaaggatttgcattacgtcactcgaaacgttttcatccatgcttagcatctactctgtataacgcatgagaggggaggcaaagaagaaaaagacacacagaagggcctttaaaaaagtagatatttaatatctaagcaggggaggggacaggacagaaagcctgcactgaggggtgcggtgccaacagggaaactcttcacctccctgcaaacctaccagtgaggctcccagagacgcagctgtctcagtgccaggggcagattgggtgtgacctctccactcctccatctcctgctgttgtcctagtggctatcacaggcctgggtgggtgggttgggggaggtgtcagtcaccttgttggtaacactaaagttgttttgttggttttttaaaaacccaatactgaggttcttcctgttccctcaagttttcttatgggcttccaggctttaagctaattccagaagtaaaactgatcttgggtttcctattctgcctcccctagaagggcaggggtgataacccagctacagggaaatcccggcccagctttccacaggcatcacaggcatcttccgcggattctagggtgggctgcccagccttctggtctgaggcgcagctccctctgcccaggtgctgtgcctattcaagtggccttcaggcagagcagcaagtggcccttagcgccccttcccataagcagctgtggtggcagtgagggaggttgggtagccctggactggtcccctcctcagatcacccttgcaaatctggcctcatcttgtattccaacccgacatccctaaaagtacctccacccgttccgggtctggaaggcgttggcaccacaagcactgtccctgtgggaggagcacaaccttctcgggacaggatctgatggggtcttgggctaaaggaggtccctgctgtcctggagaaagtcctagaggttatctcaggaatgactggtggccctgccccaacgtggaaaggtgggaaggaagccttctcccattagccccaatgagagaactcaacgtgccggagctgagtgggccttgcacgagacactggccccactttcaggcctggaggaagcatgcacacatggagacggcgcctgcctgtagatgtttggatcttcgagatctccccaggcatcttgtctcccacaggatcgtgtgtgtaggtggtgttgtgtggttttcctttgtgaaggagagagggaaactatttgtagcttgttttataaaaaataaaaaatgggtaaatcttg

SEQ ID NO: 7460 - DNA, 421 bp, Homo sapiens
ggcaggcacagacaccaaggacagagacgctggctaggccgccctccccactgttaccaacatgaagctgctcgcagcaactgtgctactcctcaccatctgcagccttgaagtacttccagaccgtgactgactatggcaaggacctgatggagaaggtcaagagcccagagcttcaggccgaggccaagtcttactttgaaaagtcaaaggagcagctgacacccctgatcaagaaggctggaacggaactggttaacttcttgagctatttcgtggaacttggaacacagcctgccacccagtgaagtgtccagaccattgtcttccaaccccagctggcctctagaacacccactggccagtcctagagctcctgtccctacccactctttgctacaataaatgctgaatgaatcca

SEQ ID NO: 7461 - DNA, 3498 bp, Homo sapiens; identical to SEQ ID NO: 7260

SEQ ID NO: 7462 - DNA, 428 bp, Homo sapiens
gctgctgctctgcttcatgtgctgtaccacgttgctgtccatgtggctgtccaacacctccaccaccgccatggtgatgcccatcgtggaggccgtgctgcaggagctggtcagtgctgaggacgagcagctcgtggcgggcaactccaacaccgaagaggccgaacccatcagtctggatgtaaagaacagccaaccttctctggaactcatctttgtcaatgaagacaggtccaacgcagacctcaccactctgatgcacaacgaggtatggccttggggaccaccaggagcacacaaccccagacccacgccggagggcatccctccaccagaagattccgccacctcaagtgaactgcaggaatcctccaacaaccacaaacacatgcttcgctgttagtgtcttcttcctgccctcagcacca

SEQ ID NO: 7463 - DNA, 8159 bp, Homo sapiens
tattgggcagtacaggtctagatgatcaaatgcctacactgaatgacttcatagaatatcactgttgagctgacaccgatctaaaagattcacatgtcggagcaagactgttagtggagtaaactcctcgagtgtacaggacccctttgttcttgttctattttgtttttaacagcttgctctgctccataaagatccatcagtcaccctcaaactcttcggaccttctgcctgttcattcctatgaagctgcgtttgctaaggtactcggtgacctggagcaaacattctaaaacagcgcaaatggcagaagcagagcctacaggcttcttgtcgggaatccgttcggagtatggaaagaatcccagtgtctgtggacttctgggttgtctgctgtgcagttctgaaatgtaaccctgggattcctaaaagaatgtcaactctgtgctttggattttctgatgaatttcacccattcatcgaggcacttcttccacatgtccgtgcaattgcctatacttggttcaacctgcaggctcgaaaacgcaagtactttaaaaagcatgagaagcgaatgtcaaaggatgaagaaagagcagtcaaagatgagcttctcagtgaaaagcctgaaatcaaacagaagtgggcatccaggctccttgccaaactgcgcaaagatattcgccaggagtatcgagaggactttgtgctcaccgtgactggcaagaagcacccgtgctgtgtcttatccaatcccgaccagaagggtaagattaggagaatcgactgcctgcgacaggcagacaaagtctggcgtctggatctagtcatggtgatcctgttcaaaggcatccccttggaaagtaccgatggagagcggctcatgaaatccccacattgcacaaacccagcactttgtgtccagccacatcatatcacagtatcagttaaggagcttgatttgtttttggcatactacgtgcaggagcaagattctggacaatcaggaagtccaagccacaatgatcctgccaagaatcctccaggttaccttgaggatagttttgtaaaatctggagtcttcaatgtatcagaacttgtaagagtatccagaacgcccataacccagggaactggagtcaacttcccaattggagaaatcccaagccaaccatactatcatgacatgaactcgggggtcaatcttcagaggtctctgtcttctccaccaagcagcaaaagacccaaaactatatccatagatgaaaatatggaaccaagtcctacaggagacttttacccctctccaagttcaccagctgctggaagtcgaacatggcacgaaagagatcaagatatgtcttctccgactactatgaagaagcctgaaaagccattgttcagctctgcatctccacaggattcttccccaagactgagcactttcccccagcaccaccatcccggaatacctggagttgcacacagtgtcatctcaactcgaactccacctccaccttcaccgttgccatttccaacacaagctatccttcctccagccccatcgagctacttttctcatccaacaatcagatatcctccccacctgaatcctcaggatactctgaagaactatgtaccttcttatgacccatccagtccacaaaccagccagtcctggtacctgggctagcttggttcctttccaagtgtcaaataggacacccatcttaccggccaatgtccaaaattacggtttgaacataattggagaacctttccttcaagcagaaacaagcaactgagggaaaaagaaacacaacaatagtttaagaaattttttttttaaataaaaaaaaaggaaaagaggaagactggacaaaacaacacaaaggcagaaaggaaagaaactgaagaaagaagataatagaccagcaattgcagcacttacaatcactaattcccttaaggttgaaactgtaatgacataaaaagggtcgatgatatttcactgatggtagatcgcagcccctgcaacgtagcctttgttacatgaagtccgctgggaaatagatgttctgtctctatgacaatatattttaactgactttctagatgccttaatatttgcatgataagctagttttattggtttagtattcttgttgtttacgcatggaatcactattcctggttatctcaccaacgaaggctaggaggcggcgtcagaggtgctgggtgacagagccatgagccagccattttataagcactctgatttctaaaagttaaaaaaaatatatgaaatctctgtagcctttagttatcagtacagatttattaaatttcggcccttaacccagccttttccagtgtgtaacccagtttgaaatcttaaaaaaagaaaaaatgaaaaaaaaaggaaaaaaagaaaaaaggaaaaaaacagtttgaacacaaaggctctatggaagaaatgcctctatgtaggtgaagtgttctctctgcatgcaacagtaaaaattaatataatattttccccacaaaagaaacacttaacagaggcaagtgcaatttataaatttatatctaaaggggaatcatgattataagtccttcagcccttggactctaaattgaggggattaaaaagaatttaaaataattttgaacgaatttattttcccctcagtttttgagggcattaaaaaggcattaaatcaagacaaatcatgtgcttgagaaaaataaaattaatgaaaacacagcacttatgttggtttagctgcagcctccttggaggtagaatttatttatttaaaattactggttgcatcaagaacccatagggtgtacaaaaggttctataaaatctgcattatagagacaaagaggcaggcaaatccatgtcacaagggtaaagcttacagtttacaaactgggaacgccagggtgtaggatataaaaacgcactcttgagaaaacaaatgtaatcagggtgctgaaaacttgcatggtgctttcagacattagccttgttcaacaaatttcttgtattgacagatccatagtgtgcatgggcagacacattttgcctctatgtctcttaaaattttaattaaaaatactctttccagtaatcctaatttgcacgaagatataatgtccacattacgtgccttgccttgaaatctaaaaaacaaaaaacaaaaaaaaaaaaacaaaaaaatacaacaaagtgacatcactacacttgttttgctgcatttattatcattttaaatctttaccatttttatgacaaaatattttgtactccagacgaagaaaaatgtgtgacatcatggattttttagacagttatacctttatctcacatttataaagcatatcatggctgtgtatagttgccgcttaaaaattgtaatcgaccagcaatattttcagtattttggtgtttttttctattaacctttcatgtttttcatcttccaattaatatttgggggggaggggtttcaaatttatacgaattatgcaataccaagttttgcctatgtaggtagtgcttttagctgtattggttattataggtaagtacacagatttaaaaaaaaaataatgtatgcttttttgtttgtttgtttgttttaattgaccaaagtgggtactgctatttttgcagtgtgatgaggtccttttgtgtactgagagatggacaggggattttttttaatatacatatatatatattctggggtgggtgggaggatttttaacactttgcagtgtagctgtgaagcagtgcaccctgagatgggcctgggctgcaaagcgactgttctgcctactgtgacaaacttcaacttacacaggttcccctctctaacttcccacctgggttgcaagctgaactcattactggttttcataacaacacaatagtaagaacaagcaaacacaacaaattctcctggaggcagacttggcttaaaaaggcagacttggcttggtgatagtttttcttgaaagttccagatccacagtggagagtgagcctgtctcatatttggcaaaaatatttgttgaaatgtccacataggggatgttggatgtttaacacttttgagagtttaacacatgaatattctttctcctagaaaacacattagacctgttggagggagtctcccgtattccttttctgccacttttcgtccccatttcatttcattaatgataggatatgatttacctgtgacttactacttcaaatggatggcagtgcacttggatttttttttaatatccagaagattgaacagagggttgctattgttgaatgtatttggactgatagattaaaatcaaagttcaatttttaaggaacaaaaaagtaaatcctgttttcattttatctccccttttaaaactgagaaccagagcagaagggaaatatagaattttaagcaattaatcttcctgtggatgaattaaacccattagatgctgatgggatttttttaaggaatggtaccttaactatatatttgatttcgtttcccctgagggctagaggctgaatggaggctggttttattttgcctttccctcaccgcccagtcccattgagtgtattcattactagaaggaaaatctttcagaattggtgacacatggtaggctgtcttaaggagtcccctggcccccttcccctaggccatggcctaataaaataaactgtcaattgttctcacagcatatcatttaataatgaatactttagaacaatgcttatgggctggagaattgtatttgattagcccattcagtttgatagcccaaatgctgaacagcacagcgggatcctagcagtgcaagttcaaaagtaagtccaatcatttctgtgatactcgccctggtagcaaacagatcatctcagccaagctcttcatgtatctttgacctattaggtgaacaaatgaacctcacaggacacacagtattttttaaaggcagactcgctctcttttttgccagtgagcagttctagctaaccaagttacacactgtgggtattcctgcctgcctcttgaatacaaaggcctagttcaagtgttgctttttttatttcaaatcaattttttcttctttcctttttgagataaaactattaaaagtactactatatatataaaatctcaaatcaacttttcggcctcctcctcgtgtaccaggaagtatattctgacgaagggccccacttttgcaggtcttgcacgcccctcccttacccagaactgcagagcttcaggatggcgaaggtcacccaagggcatgagtagggagtggtgtctccaaccatcagttccgtggcactgttcagcctttgtgtgctgccctgccacccaccactcacagtgcctctgaagcgtgttacccctggagtgacgtgagcatttgaggcttgtctaaggaaaaaaataaaaggcagtgaaggagactgtacataaagacatggcaaaaatcttaattatagcaatatagttatcgggtaatgttcgggtgggcagctccattaaaaaatatgtgaatgaatctgtgaagctgcaagtagcgagaagagcgaaaggtcttcttaatgaaccgcctaccttgtagacagtaatttgtacactgtatagttttgttaagaattttttttaaattaaaattcccatgtttgtaaagctaactttttaacaattataatggaactatatgttgtttccatttttaaagtaaacaagaatattccttgtttagagactggacttgagttaaaactctccagtctcttaagttatgtattaaaaagaaaatctgtccatgttaggagttatttcacagattcctgtgcttgaaaagcataggatactaatcctttaaaaaagtgtaaatggagaaaagttatattttatgaaggttattttgttgtatttagtattggaaaagttggtttccagagcatttcagaatgtcgaagcaccactgtctttttattagtatatacggcctttagcaaaagtttttgtgattgttacgtgatggtatttaaggttaagtttcacagagcattcaggataggcagaaaactaaaacagtgctatgtctcacataacgtgtcctcagggagcagaatcttggatttgtgacttgtagcttcataaggactcaacgaaagagattgcacagggacatcttcagcggtgtgacagcaggacatgttctttacctagattcaaattctatgtactgtgtgaaatgatgaaggctgcagaaagttatcccatattcagtgtacagtattcatttttaatgaaacaactctacaatattgctggcagataggccccaagcatgacattcaatatagtttacatgttcctgtcaaggtcttttgttaacattaaccagctgcatgctttctggactttaagaaattgggtttctatagaaaactttttttttttttttttttttaatgtgcaggctattcaagttcaatagtaaaagctcaaaaatgaatgttctactccatgctgaaggagctgaaagctgccttcttcatattttgcactttctggtagttcccctgttttttctaattccctaaaattgtgtgggtggagtggagccctgcagttggggggtaacatggaccactgattttgccctttgaccctgcacaatgacctttgcatcagccaaactcattgccatgacaactctttgtactgtgtccgtgccacagatctgttggtcacattgttaatagtaaaggggacaagttggagacggtcaatttttacattttttgttgcaattttttcttcaatggttgtaagtagtttttttttttttttaataataaaagggttcactagttaatactctagaaatatctgtgtgttgcaattcaaatgtatgttgagattgtgaaaagcgcttcagtgccactagcttaccggtacactagactaagcccttgatgacttattgcatgatacagtaccaggaacaacaggtggcctaaatacatgaaaagcagtgtaagctagtgacactaaagccagtcttgtattactgtatttttgacagaatggttttgaaaactgtgctacagggactgatgtggcaaatatatctctttatgcagaaggaagtctttttttttcttttttttttttttaagaagtatggctttttatgcatccttcatcgagggcattgaagttgcatggactgataaaagttgatgcaaaacaagaaagaaacaaacaaaaaaaaaaaaccagcaaaatgtttaccaaaaaactcaaacaaatgagcagtgcctgttcaatttcacagtctctgttgagttcagttgtaaatatgtttcaaatgacattttcttgggaaaaaaaatctctacaacattgtagaatgtgaggggtaactacatcccaggcataggtttctcaaagctgcagtagattatgtcttcatcaagctgttaatttgtgcttatatcatatagaacttttagcatcctgggaagagctgcccccacctcaatgatatttctctgagaacaacttttgtaggactgtgtgtttctttagatacatttagtacaactgtaggtgacgagtagtcagttattgcttgctagctacacaccagggttgatccattttaaaacttttggcattttgtcctcatgggccataaatacagaaccttgtattttaattaaatttttttacaaaaggaggcacatgcacaatctccatgtaacaaacctttagcagtaggatgtattatacgacagttacttaatttctagagttcaggcctctgggatcaaccccagactgggccagaatgttagtgaaggttttattgtgcccggttggaggataacgttctttgggtactttttgtgggttgcaaatgaactcaattgccacaagttttaaactggtgtaaatcaagcttgacttaatgtgattgttactgttatatccagcctatactgctagcagctgctcatactgcagtcaattactggaagcggatatatttcctatgcaaaaactgtttaaacaataaaatgagctatgctacagactctg

SEQ ID NO: 7464 - DNA, 4965 bp, Homo sapiens
atgaaatggaaacatgttccttttttggtcatgatatcactcctcagcttatccccaaatcacctgtttctggcccagcttattccagaccctgaagatgtagagagggggaacgaccacgggacgccaatccccacctctgataacgatgacaattcgctgggctatacaggctcccgtcttcgtcaggaagattttccacctcgcattgttgaacacccttcagacctgattgtctcaaaaggagaacctgcaactttgaactgcaaagctgaaggccgccccacacccactattgaatggtacaaagggggagagagagtggagacagacaaagatgaccctcgctcacaccgaatgttgctgccgagtggatctttatttttcttacgtatagtacatggacggaaaagtagacctgatgaaggagtctatgtctgtgtagcaaggaattaccttggagaggctgtgagccacaatgcatcgctggaagtagccatacttcgggatgacttcagacaaaacccttcggatgtcatggttgcagtaggagagcctgcagtaatggaatgccaacctccacgaggccatcctgagcccaccatttcatggaagaaagatggctctccactggatgataaagatgaaagaataactatacgaggaggaaagctcatgatcacttacacccgtaaaagtgacgctggcaaatatgtttgtgttggtaccaatatggttggggaacgtgagagtgaagtagccgagctgactgtcttagagagaccatcatttgtgaagagacccagtaacttggcagtaactgtggatgacagtgcagaatttaaatgtgaggcccgaggtgaccctgtacctacagtacgatggaggaaagatgatggagagctgcccaaatccagatatgaaatccgagatgatcataccttgaaaattaggaaggtgacagctggtgacatgggttcatacacttgtgttgcagaaaatatggtgggcaaagctgaagcatctgctactctgactgttcaagaacctccacattttgttgtgaaaccccgtgaccaggttgttgctttgggacggactgtaacttttcagtgtgaagcaaccggaaatcctcaaccagctattttctggaggagagaagggagtcagaatctacttttctcatatcaaccaccacagtcatccagccgattttcagtctcccagactggcgacctcacaattactaatgtccagcgatctgatgttggttattacatctgccagactttaaatgttgctggaagcatcatcacaaaggcatatttggaagttacagatgtgattgcagatcggcctcccccagttattcgacaaggtcctgtgaatcagactgtagccgtggatggcactttcgtcctcagctgtgtggccacaggcagtccagtgcccaccattctgtggagaaaggatggagtcctcgtttcaacccaagactctcgaatcaaacagttggagaatggagtactgcagatccgatatgctaagctgggtgatactggtcggtacacctgcattgcatcaacccccagtggtgaagcaacatggagtgcttacattgaagttcaaggtaaagtaaatgaatttggagttccagttcagcctccaagacctactgacccaaatttaatccctagtgccccatcaaaacctgaagtgacagatgtcagcagaaatacagtcacattatcgtggcaaccaaatttgaattcaggagcaactccaacatcttatattatagaagccttcagccatgcatctggtagcagctggcagaccgtagcagagaatgtgaaaacagaaacatctgccattaaaggactcaaacctaatgcaatttaccttttccttgtgagggcagctaatgcatatggaattagtgatccaagccaaatatcagatccagtgaaaacacaagatgtcctaccaacaagtcagggggtggaccacaagcaggtccagagagagctgggaaatgctgttctgcacctccacaaccccaccgtcctttcttcctcttccatcgaagtgcactggacagtagatcaacagtctcagtatatacaaggatataaaattctctatcggccatctggagccaaccacggagaatcagactggttagtttttgaagtgaggacgccagccaaaaacagtgtggtaatccctgatctcagaaagggagtcaactatgaaattaaggctcgccctttttttaatgaatttcaaggagcagatagtgaaatcaagtttgccaaaaccctggaagaagcacccagtgccccaccccaaggtgtaactgtatccaagaatgatggaaacggaactgcaattctagttagttggcagccacctccagaagacactcaaaatggaatggtccaagagtataaggtttggtgtctgggcaatgaaactcgataccacatcaacaaaacagtggatggttccaccttttccgtggtcattccctttcttgttcctggaatccgatacagtgtggaagtggcagccagcactggggctgggtctggggtaaagagtgagcctcagttcatccagctggatgcccatggaaaccctgtgtcacctgaggaccaagtcagcctcgctcagcagatttcagatgtggtgaagcagccggccttcatagcaggtattggagcagcctgttggatcatcctcatggtcttcagcatctggctttatcgacaccgcaagaagagaaacggacttactagtacctacgcgggtatcagaaaagtcccgtcttttaccttcacaccaacagtaacttaccagagaggaggcgaagctgtcagcagtggagggaggcctggacttctcaacatcagtgaacctgccgcgcagccatggctggcagacacgtggcctaatactggcaacaaccacaatgactgctccatcagctgctgcacggcaggcaatggaaacagcgacagcaacctcactacctacagtcgcccagctgattgtatagcaaattataacaaccaactggataacaaacaaacaaatctgatgctccctgagtcaactgtttatggtgatgtggaccttagtaacaaaatcaatgagatgaaaaccttcaatagcccaaatctgaaggatgggcgttttgtcaatccatcagggcagcctactccttacgccaccactcagctcatccagtcaaacctcagcaacaacatgaacaatggcagcggggactctggcgagaagcactggaaaccactgggacagcagaaacaagaagtggcaccagttcagtacaacatcgtggagcaaaacaagctgaacaaagattatcgagcaaatgacacagttcctccaactatcccatacaaccaatcatacgaccagaacacaggaggatcctacaacagctcagaccggggcagtagtacatctgggagtcaggggcacaagaaaggggcaagaacacccaaggtaccaaaacagggtggcatgaactgggcagacctgcttcctcctcccccagcacatcctcctccacacagcaatagcgaagagtacaacatttctgtagatgaaagctatgaccaagaaatgccatgtcccgtgccaccagcaaggatgtatttgcaacaagatgaattagaagaggaggaagatgaacgaggccccactccccctgttcggggagcagcttcttctccagctgccgtgtcctatagccatcagtccactgccactctgactccctccccacaggaagaactccagcccatgttacaggattgtccagaggagactggccacatgcagcaccagcccgacaggagacggcagcctgtgagtcctcctccaccaccacggccgatctcccctccacatacctatggctacatttcaggacccctggtctcagatatggatacggatgcgccagaagaggaagaagacgaagccgacatggaggtagccaagatgcaaaccagaaggcttttgttacgtgggcttgagcagacacctgcctccagtgttggggacctggagagctctgtcacggggtccatgatcaacggctggggctcagcctcagaggaggacaacatttccagcggacgctccagtgttagttcttcggacggctcctttttcactgatgctgactttgcccaggcagtcgcagcagcggcagagtatgctggtctgaaagtagcacgacggcaaatgcaggatgctgctggccgtcgacattttcatgcgtctcagtgccctaggcccacaagtcccgtgtctacagacagcaacatgagtgccgccgtaatgcagaaaaccagaccagccaagaaactgaaacaccagccaggacatctgcgcagagaaacctacacagatgatcttccaccacctcctgtgccgccacctgctataaagtcacctactgcccaatccaagacacagctggaagtacgacctgtagtggtgccaaaactcccttctatggatgcaagaacagacagatcatcagacagaaaaggaagcagttacaaggggagagaagtgttggatggaagacaggttgttgacatgcgaacaaatccaggtgatcccagagaagcacaggaacagcaaaatgacgggaaaggacgtggaaacaaggcagcaaaacgagaccttccaccagcaaagactcatctcatccaagaggatattctaccttattgtagacctacttttccaacatcaaataatcccagagatcccagttcctcaagctcaatgtcatcaagaggatcaggaagcagacaaagagaacaagcaaatgtaggtcgaagaaatattgcagaaatgcaggtacttggaggatatgaaagaggagaagataataatgaagaattagaggaaccttcatca

SEQ ID NO: 7465 - DNA, 835 bp, Homo sapiens; identical to SEQ ID NO: 6666

SEQ ID NO: 7466 - DNA, 563 bp, Homo sapiens
ctagcatgcatctctttctgagctttctctgagccatccccaggctggacagagcagtgagcactggggatggggtatcttctttgcagataagaaccgctgggaggaccctggtaagcagctctacaacgtggaggccacatcctatgccctcttggccctactgcagctaaaagactttgactttgtgcctcccgtcgtgcgttggctcaatgaacagagatactacggtggtggctatggctctacccaggccaccttcatggtgttccaagccttggctcaataccaaaaggacgcccctgaccaccaggaactgaaccttgatgtgtccctccaactgcccagccgcagctccaagatcacccaccgtatccactgggaatctgccagcctcctgcgatcagaagagaccaaggaaaatgagggtttcacagtcacagctgaaggaaaaggccaaggcaccttgtcggtggtgacaatgtaccatgctaaggccaaagatcaactcacctgtaataaattcgacctcaaggtcaccataaaaccagcaccggaaacag

SEQ ID NO: 7467 - DNA, 578 bp, Homo sapiens
atttccaagtagtatagttgcagatcttcgaacgccattcctgtgttctgtgaattcaagacaacatgggttttataaccctttgactctgctcagcatctcccagatcaagacgaaggaggactctcggaagccaagaaaggtttaagaagtctttctggatagagagcagtgcccaggcaggaagcctttcgccggcagagcggggtccaaggacgagctggagaggacagaggcgcgatgggcctgctgcagggcctgctccgagtccggaagctgctgctggtcgtctgcgtcccgctcctgctgctgcctctgcccgtcctccaccccagcagcgaggcctcgtgtgcttacgtgctgatcgtgactgctgtgtactgggtgtcggaggcagtgcctctgggagctgcagccctggtgccggccttcctttacccgttcttcggagtcctccggtccaatgaggtggcggcggagtacttcaagaacaccacgctgctgctggtgggggtcatctgcgtggcggctgccgtggagaagtggaacctgcataagcgcattgctctgcgcatggt

SEQ ID NO: 7468 - DNA, 2987 bp, Homo sapiens
gatccccgcccctgctgcccgccacgtccctcacgtaccactcggcagaggcgcggggaaacctggcgtactggctgtggcttctctagcgggactcggcatgaggctggcgcggctgcttcgcggagccgccttggccggcccgggcccggggctgcgcgccgccggcttcagccgcagcttcagctcggactcgggctccagcccggcgtccgagcgcggcgttccgggccaggtggacttctacgcgcgcttctcgccgtccccgctctccatgaagcagttcctggacttcggatcagtgaatgcttgtgaaaagacctcatttatgtttctgcggcaagagttgcctgtcagactggcaaatataatgaaagaaataagtctccttccagataatcttctcaggacaccatccgttcaattggtacaaagctggtatatccagagtcttcaggagcttcttgattttaaggacaaaagtgctgaggatgctaaagctatttatgactttacagatactgtgatacggatcagaaaccgacacaatgatgtcattcccacaatggcccagggtgtgattgaatacaaggagagctttggggtggatcctgtcaccagccagaatgttcagtactttttggatcgattctacatgagtcgcatttcaattagaatgttactcaatcagcactctttattgtttggtggaaaaggcaaaggaagtccatctcatcgaaaacacattggaagcataaatccaaactgcaatgtacttgaagttattaaagatggctatgaaaatgctaggcgtctgtgtgatttgtattatattaactctcccgaactagaacttgaagaactaaatgcaaaatcaccaggacagccaatacaagtggtttatgtaccatcccatctctatcacatggtgtttgaacttttcaagaatgcaatgagagccactatggaacaccatgccaacagaggtgtttacccccctattcaagttcatgtcacgctgggtaatgaggatttgactgtgaagatgagtgaccgaggaggtggcgttcctttgaggaaaattgacagacttttcaactacatgtattcaactgcaccaagacctcgtgttgagacctcccgcgcagtgcctctggctggttttggttatggattgcccatatcacgtctttacgcacaatacttccaaggagacctgaagctgtattccctagagggttacgggacagatgcagttatctacattaaggctctgtcaacagactcaatagaaagactcccagtgtataacaaagctgcctggaagcattacaacaccaaccacgaggctgatgactggtgcgtccccagcagagaacccaaagacatgacgacgttccgcagtgcctagacacacttgggacatcggaaaatccaaatgtggcttttgtattaaatttggaagtgtggcccagagttgctcagaattggagcagagcctgagacgtatctgcagatcctgtcatcagctggcaagtccaggagactgtgtcatttagagactgtgttgttagttatccctcaacatcttctaaggtggcaggaaataatattggaaataacattttaaagtaaaaattttaaagtttaaagaagagttttgccacttaaacaggggagctttgtctggaaaatacactgagttgaaacacttcatccttggaaggattatataagatgaacagttgtgataaatgtgtagattagagggatgtgaatgggcagttagtccagtgccctcatttaagaggccaagatcctgattcagaggaggcatcctttgcccagagctgcttagctaatctgaccaaatgttgggaaaaatgtctcacctaacccactattccttaattatggattttgtgaaaaacaatagaacatgttaatgagtaatttatattagttcgatgtattacaattttttagctttaaattacagttttcttataatgttgaaatgttttagaatcctttgaatctaagtatttgtttcctaaatgaaacatttgtacaacatttgatgtttttacttatgaaatattctcctcccccaagaaaatttaaactttttctctctatttaaaagctaagaaatgttttaaaggaaaaatgaaattatcttcctttagcttatttttaaggtaaaacagctttttactctgttattgtggtaatggacagaatattacatacaaaaatattctgggagagctttttcctagttggttttaaatcattgtgccacctgaaaggtttttagattttataggagctaatttgtccaccagcattaatgtaacacagtgtagttatgaaaatatattgaaggacaggaagtggacacgaagtgatttttgtaacctgagcagttaatgaatgtgccaacattttctaggaagggacagcaagaatattctgctctgtagttaaaatactggctggcttttgatgtcttcatgcttaattgtgatcactttcttgcactgtgatgtttttacgtgaatatgttgaagtagaagtctaccatattattttataaaatgttttctgtatggcaataaactgaaaacatggatcaacccttcttttgaaaataaactgagtcaatttagccttttaaaaatatagtcatctcttttaaatagaatcctcttccaccatcaaggctcaacattttgtaagcatccaaaaaattggtaattagggggcttgcactaaatttcactatcttcagtagagaggaactgtttggaacttagatttccaatgtgtatattctaatggagaaagcaagaggtagagtttgtatgtttgacttaccttagatttttattttccatacatactgcaaatgattgacttgttgcataaatgaagatcttctgttgtgtgcttttcaaacactgtaaataaatttgaaatttgaa

SEQ ID NO: 7469 - DNA, 3446 bp, Homo sapiens
cttcgctttcagagcatcctcactccgcccagttcggtgccagctgcgtgggctccagcttcgatcgttttccttggaatgctccaaaactcagcagcgactaagggaattccattggaatttgccgggcgtgctctcaccccgcacggcacccgcgccgtcagtcctcggatcccatcacttcagcccgaagattgcaactttgcagagacgaagaaatagcatggcatgaaacatggctcagttctattacaaaagaaatgttaatgctccctatagagaccgcatccctctaaggatagtaagagcagaatcagaactctcgccatcagaaaaagcctacttgaatgctgtggaaaagggagattatgccagtgtcaagaaatccctagaggaagctgaaatttattttaaaatcaatattaattgcattgatcctctcggaagaactgctctcctcattgcaattgaaaatgagaacttggagctcatcgaactactcttaagctttaatgtctatgttggagatgctctattacatgctatcagaaaagaagtcgtcggagctgttgagctgttattgaaccacaaaaaacctagtggagaaaaacaggtgcctcctatactccttgataagcagttctctgaattcactccagacattacaccaatcattttggcagcccatacaaataattatgagataataaaactcttggttcagaaaggagtctcagtgcctcgaccccacgaggtccgctgtaactgtgtggaatgcgtgtccagttcagatgtggacagcctccgtcactcacgctccagactcaacatctacaaggccttggccagtccctctctcattgcactgtcaagcgaagatccttttctcacagcctttcagttaagttgggaacttcaggaactgagcaaggtggaaaatgaattcaagtcggagtatgaagagctgtcacggcagtgcaaacaatttgctaaggacctactggatcagacgagaagttccagagaactggaaatcattcttaattaccgagatgacaatagtctcatagaagaacaaagtggaaatgatcttgcaagactaaaattggccattaagtaccgtcaaaaagagtttgttgcccagcccaattgtcaacagctgctggcatctcgctggtacgatgagtttccaggctggaggagaagacactgggcagtgaagatggtgacatgtttcataataggacttctttttcctgtcttctctgtgtgctacctgatagctcccaaaagcccacttggactgttcatcaggaagccatttatcaagtttatctgccacacagcctcctatttgacttttttgttcctgctgctgcttgcctctcagcacatcgacaggtcagacttgaacaggcaaggtccaccaccaaccatcgtcgagtggatgatattaccgtgggtcctgggcttcatatggggagaaattaaacagatgtgggatggcggacttcaggactacatccatgattggtggaatctaatggactttgtaatgaactccttatatttagcaacaatctccttgaaaattgttgcatttgtaaagtacagtgcccttaatccacgagaatcatgggacatgtggcatcccactctggtggcagaggctttatttgctattgcaaacatcttcagttctctgcgtctgatctcactgtttactgcaaattctcacctgggacctctgcaaatatctctgggaagaatgctcctggacattttgaagtttctattcatatactgccttgtgttgctagcatttgcaaatggcctaaatcaattgtacttctattatgaagaaacgaaagggttaacctgcaaaggcataagatgtgaaaagcagaataatgcattttcaacgttatttgagacactgcagtccctgttttggtcaatatttgggctcatcaatttatatgtgaccaatgtcaaagcacagcatgaatttactgagtttgttggtgccaccatgtttgggacatacaatgtcatctctctggttgttctactcaacatgttaatagctatgatgaataattcttaccaactgattgctgaccatgcagatatagaatggaaatttgcacgaacaaagctttggatgagttattttgaagaaggaggtactctgcctactcccttcaatgtcatcccgagccccaagtctctctggtacctgatcaaatggatctggacacacttgtgcaagaaaaagatgagaagaaagccagaaagttttggaacaataggggtaagaacacagcataggcgagctgctgataacttgagaagacatcaccaataccaagaagttatgaggaacctggtgaagcgatacgttgctgcaatgattagagatgctaaaactgaagaaggcctgaccgaagagaactttaaggaactaaagcaagacatttctagtttccgctttgaagtcctgggattactaagaggaagcaaactttccacaatacaatctgcgaatgcctcgaaggagtcttcaaattcggcagactcagatgaaaagagtgatagcgaaggtaatagcaaggacaagaaaaagaatttcagcctttttgatttaaccaccctgattcatccgagatcagcagcaattgcctctgaaagacataacataagcaatggctctgccctggtggttcaggagccgcccagggagaagcagagaaaagtgaattttgtgaccgatatcaaaaactttgggttatttcatagacgatcaaaacaaaatgctgctgagcaaaatgcaaaccaaatcttctctgtttcagaagaagttgctcgtcaacaggctgcaggaccacttgagagaaatattcaactggaatctcgaggattagcttcacggggtgacctgagcattcccggtctcagtgaacaatgtgtgttagtagaccatagagaaaggaatacggacacactggggttacaggtaggaaagagagtgtgtccattcaagtcagagaaggtggtggtggaggacacggttcctataataccaaaggagaaacatgcaaaagaagaggactctagtatagactatgatctaaacctcccagacacagtcacccacgaagattacgtgaccacaagattgtgatacttgaaggaggaagcgtttaccatacacatacgtattttccgtagtgctctgggtgggggaaaatgtttaaattgtattagcaaatgctaacttacactttatagcgtttatcagctgtggcatattacctgtaacatgtttaaataaggcaaaggcaatcaaaaacctttttgttttgtagcctgcttttgctttcacaatttgtcttacaattgtttttgttaataaataaatgcaccttgtattcttgtactgttgc

SEQ ID NO: 7470 - DNA, 2290 bp, Homo sapiens; identical to SEQ ID NO: 129

SEQ ID NO: 7471 - DNA, 2994 bp, Homo sapiens
aaaaatgcataaagagccaagtgcttatattctggccaagttatgaggctctgagaacaagagcttgaggggaagactgttaaccccatccacgccaccagaattagctctttcccttttggtttgcaagcactgcctgtaaagccctcgcatgagaggccagcctgctagggaaatccaggaatctgcaacaaaaacgatgacagtctgaaatactctctggtgccaacctccaaattctcgtctgtcacttcagacccccactagttgacagagcagcagaatttcaactccagtagacttgaatatgcctctgggcaaagaagcagagctaacgaggaaagggatttaaagagtttttcttgggtgtttgtcaaacttttattccctgtctgtgtgcagaggggattcaacttcaatttttctgcagtggctctgggtccagccccttacttaaaggccataagatgttttattgaaagaaactttcaatatcaagtaatccaaccaaccttctaagataagccttttccttcaacacaaagaagtgcattttgccaaatctggaaagcatgaagactgggctttttttcctatgtctcttgggaactgcagctgcaatcccgacaaatgcaagattattatctgatcattccaaaccaactgctgaaacggtagcacctgacaacactgcaatccccagtttaagggctgaagctgaagaaaatgaaaaagaaacagcagtatccacagaagacgattcccaccataaggctgaaaaatcatcagtactaaagtcaaaagaggaaagccatgaacagtcagcagaacagggcaagagttctagccaagagctgggattgaaggatcaagaggacagtgatggtcacttaagtgtgaatttggagtatgcaccaactgaaggtacattggacataaaagaagatatgagtgagcctcaggagaaaaaactctcagagaacactgattttttggctcctggtgttagttccttcacagattctaaccaacaagaaagtatcacaaagagagaggaaaaccaagaacaacctagaaattattcacatcatcagttgaacaggagcagtaaacatagccaaggcctaagggatcaaggaaaccaagagcaggatccaaatatttccaatggagaagaggaagaagaaaaagagccaggtgaagttggtacccacaatgataaccaagaaagaaagacagaattgcccagggagcatgctaacagcaagcaggaggaagacaatacccaatctgatgatattttggaagagtctgatcaaccaactcaagtaagcaagatgcaggaggatgaatttgatcagggtaaccaagaacaagaagataactccaatgcagaaatggaagaggaaaatgcatcgaacgtcaataagcacattcaagaaactgaatggcagagtcaagagggtaaaactggcctagaagctatcagcaaccacaaagagacagaagaaaagactgtttctgaggctctgctcatggaacctactgatgatggtaataccacgcccagaaatcatggagttgatgatgatggcgatgatgatggcgatgatggcggcactgatggccccaggcacagtgcaagtgatgactacttcatcccaagccaggcctttctggaggccgagagagctcaatccattgcctatcacctcaaaattgaggagcaaagagaaaaagtacatgaaaatgaaaatataggtaccactgagcctggagagcaccaagaggccaagaaagcagagaactcatcaaatgaggaggaaacgtcaagtgaaggcaacatgagggtgcatgctgtggattcttgcatgagcttccagtgtaaaagaggccacatctgtaaggcagaccaacagggaaaacctcactgtgtctgccaggatccagtgacttgtcctccaacaaaaccccttgatcaagtttgtggcactgacaatcagacctatgctagttcctgtcatctattcgctactaaatgcagactggaggggaccaaaaaggggcatcaactccagctggattattttggagcctgcaaatctattcctacttgtacggactttgaagtgattcagtttcctctacggatgagagactggctcaagaatatcctcatgcagctttatgaagccaactctgaacacgctggttatctaaatgagaagcagagaaataaagtcaagaaaatttacctggatgaaaagaggcttttggctggggaccatcccattgatcttctcttaagggactttaagaaaaactaccacatgtatgtgtatcctgtgcactggcagtttagtgaacttgaccaacaccctatggatagagtcttgacacattctgaacttgctcctctgcgagcatctctggtgcccatggaacactgcataacccgtttctttgaggagtgtgaccccaacaaggataagcacatcaccctgaaggagtggggccactgctttggaattaaagaagaggacatagatgaaaatctcttgttttgaacgaagattttaaagaactcaactttccagcatcctcctctgttctaaccacttcagaaatatatgcagctgtgatacttgtagatttatatttagcaaaatgttagcatgtatgacaagacaatgagagtaattgcttgacaacaacctatgcaccaggtatttaacattaactttggaaacaaaaatgtacaattaagtaaagtcaacatatgcaaaatactgtacattgtgaacagaagtttaattcatagtaatttcactctctgcattgacttatgagataattaatgattaaactattaatgataaaaataatgcatttgtattgttcataatatcatgtgcacttcaagaaaatggaatgctactcttttgtggtttacgtgtattattttcaatatcttaataccctaataaagagtcc

SEQ ID NO: 7472 - DNA, 2032 bp, Homo sapiens
cagagcagctcctcttccatctccagaaatgacctccaccttcaacccccgagaatgtaaactgtccaagcaagaagggcaaaactatggcttcttcctgcgaattgagaaggacaccgagggccacctggtccgggtggttgagaagtgtagcccagcagagaaggctggccttcaagatggagacagagttcttaggatcaatggtgtctttgtggacaaagaagaacatatgcaggttgtggatctggtcagaaagagtgggaattcagtgactttactagttctggatggggattcctatgagaaagcagtgaaaacacgggtggacttgaaagagttgggtcaaagtcagaaggagcaaggtttgagtgataatatactttcccctgtgatgaatggaggtgtgcaaacttggacccagccccggctctgctatctcgtgaaggaaggaggcagctatggcttctctctgaaaactgtccaaggtaaaaagggggtgtacatgactgatattacacctcaaggtgtggctatgagagctggagttctggctgatgatcacttgattgaagtgaatggagagaatgtagaggatgccagccatgaggaagtggttgaaaaggtgaagaagtcaggaagccgtgtcatgttcctgctggtggacaaagaaactgacaagcgtcatgttgagcagaagatacaattcaaaagagaaacagccagtttgaaactgttaccccaccagccccgaattgtggagatgaagaaaggaagcaatggctatggtttctatctgagggcaggctcagaacagaaaggtcaaatcatcaaggacatagattctggaagtccagcagaggaggctggcttgaagaacaatgatctggtagttgctgtcaacggcgagtctgtggaaaccctggatcatgacagtgtggtagaaatgattagaaagggtggagatcagacttcactgttggtggtagacaaagagacggacaacatgtacagactggctcatttttctccatttctctactatcaaagtcaagaactgcccaatggctctgtcaaggaggctccagctcctactcccacttctctggaagtctcaagtccaccagatactacagaggaagtagatcataagcctaaactctgcaggctggctaaaggtgaaaatggctatggctttcacttaaatgcgattcggggtctgccaggctcattcatcaaagaggtacagaagggcggtcctgctgacttggctgggctagaggatgaggatgtcatcattgaagtgaatggggtgaatgtgctagatgaaccctatgagaaggtggtggatagaatccagagcagtgggaagaatgtcacacttctagtctgtggaaagaaggcctatgattatttccaagctaagaaaatccctattgtttcctccctggctgatccacttgacacccctccagattctaaagaaggaatagtggtggagtcaaaccatgactcgcacatggcaaaagaacgggcccacagtacagcctcacattcttcttccaattctgaagatacagagatgtgatgaaaacaagtaatagctttggctgtttatttgatagctgtttctgggtatttaataggaatcctttctcaaggaatgagttgtgacctgtttactgtctctttagaagaaaaactccactggaaaccattcaccatgtgtgattgtcttctgttatcatttgtcttacaggcggctattgcagacggctaatttatgcttaacttaggaagagataaggcaagagctagatttttttcatgtgatcttttccaagcttcaacttaacttaactacatttctctgtatgatgatgtctcttacttctacaggttccttgagcaccaaagatgattcataactctgtataggtgacagctgcttataaaagcatcttagcagataagcctattaaaattgtgcttttgtaacaatgttgtggttgctagaataaataccattaac

SEQ ID NO: 7473 - DNA, 2028 bp, Homo sapiens
ataaaacaaaggaaccagaaccacatccactgatcggatttgcctggggaggaggggtgctctctcctttgatcttctcttctggaagagatggaccaaaagcctctccagcaataatccgtccacttacatgcagattttcttctgcctctgccacccctgagacagcaagaccaactctcctcttcctcctcctcctcctcagcctactcactgcaagacgacgagtatgaagatctttatgatgatccacttccatgaaatgattcttgaagactatctttccagcttgtcacatatgcaaggtgtatttacaggagacagcaatggaaacctggtcagttgagcaggtctgcagttggttggtggagaaaaatttaggagagctagttcatagatttcaagaggaagaagtaagtggggccgctcttcttgcacttaatgatcggatggttcagcaactggtaaagaaaattgggcaccaggctgttctgatggatttaattaaaaaatacaagcagaacactcaaggactgaagtccccagaaaaccccaaaaaggcagccctggtcatgcaaacagaagcagctcgagattacagggatgaagagtcctccagtccagccaggcatggggagcagatgccatctttctatccagctgaaaaccttgataatggactaattgaccaaagagtattgaaacagagaagaaatgtgaaacaaattctagcaagaagcaaagcattacagtggacgaagtcctatgttttaccagagtttccctatgatgtcaaatgcatgttagcagagcagaagtgcccggatcacagcatgaggataaggatcattgagtttctccaggccgacatgactaagtatctggaaggctcactgtaccccagcacccagcagtacaatgacgtggttaatgccctgctgcaggcccaccctttcctggatgaggatggctgtggcttctttttatggaaacgagccctcaaagatcgctttaaatatgttcgaagacccatagaagatgatgagcaagtgattagaaataagtgtaaatttggacaccgaagaggccagacaaggaaatctcttgctgatataagatttgatgaaattaaacttgtccagataaaagaagaagctgtttgttttgattctgagctagatgaacatattaagtggttccagcaagaatacgtgaaaacagaaaaggactggagagaaattgacaagagaatgagccaaactttggaaataagaagaaagatgattggcagccgaacacctctgaaggacattcttaaactgtttcctttcttgaagtgcccttatcagatgttcagagaattccaacttcttacaagaacagatatttataagaaaacaaggcacattttggaatcctattcagaaaatatactgacttctttttcagtggtggacaatccaatcaatattgtattgcaagaaaaaatgaaacattacacagatgaagacatgttgaaatacatgaagatgacagccacatgtttactcctcccagatgtttttggggatgatcccagcctttttgtcatcatgaatgaacaggtgcaagtgtccacacctgtgttggaagttaaaaaccctttcaacatggaggtctgcgaattttctttatatttagaaagggagaggctcacaaaggtggacgactgtgttacagccttggctgcgctagtagctgcctttcatgtatttaggattgagtgtccaagaagactgtcccaaactttcaacttcctagaaacgctgattttcgatatgcacagtccttattttccttctttgaaagaaaaggaaaacgaagtaggatttcagcacccactcacttaatagcatgccaaatattgtactggaatttacctctgggaaaactgaagcttcataagaaattgttttgatttagggttgtggtagaggtaggtatgagaaaatcatcttgtatttatagatgctaatgaatttcaatgct

SEQ ID NO: 7474 - DNA, 2236 bp, Homo sapiens
aagccgcagctttgaagcctgagcggccgaactcggcagctccaacccaactcggcttaactccgcctcaccgagcccagtccaagactctgtgctccctaggtttgcaacagctctctgatcatcttcttcaattcctgctaggatgccgtggcaagcatttcgcagatttggtcaaaagctggtacgcagacgtacactggagtcaggcatggctgagactcgccttgccagatgcctaagcaccctggatttagtggccctgggtgtgggcagcacattgggtgcaggcgtgtatgtcctagctggcgaggtggccaaagataaagcagggccatccattgtgatctgctttttggtggctgccctgtcttctgtgttggctgggctgtgctatgcggagtttggtgcccgggttccccgttctggttcggcatatctctacagctatgtcactgtgggtgaactctgggccttcaccactggctggaacctcatcctctcctatgtcattggtacagccagtgtggcccgggcctggagctctgcttttgacaacctgattgggaaccacatctctaagactctgcaggggtccattgcactgcacgtgccccatgtccttgcagaatatccagatttctttgctttgggcctcgtgttgctgctcactggattgttggctctcggggctagtgagtcggccctggttaccaaagtgttcacaggcgtgaaccttttggttcttgggttcgtcatgatctctggcttcgttaagggggacgtgcacaactggaagctcacagaagaggactacgaattggccatggctgaactcaatgacacctatagcttgggtcctctgggctctggaggatttgtgcctttcggcttcgagggaattctccgtggagcagcgacctgtttctatgcatttgttggtttcgactgtattgctaccactggagaagaagcccagaatccccagcgttccatcccgatgggcattgtgatctcactgtctgtctgctttttggcgtattttgctgtctcttctgcactcaccctgatgatgccttactaccagcttcagcctgagagccctttgcctgaggcatttctctacattggatgggctcctgcccgctatgttgtggctgttggctccctctgtgctctttctaccagcctcctgggctccatgttccccatgcctcgggtgatctacgcgatggcagaggatggcctcctgttccgtgtacttgctcggatccacaccggcacacgcaccccaatcatagccaccgtggtctctggcattattgcagcattcatggcattcctcttcaaactcactgatcttgtggacctcatgtcaattgggaccctgcttgcttactccctggtgtcgatttgtgttctcatcctcaggtatcaacctgatcaggagacaaagactggggaagaagtggagttgcaggaggaggcaataactactgaatcagagaagttgaccctatggggactatttttcccactcaactccatccccactccactctctggccaaattgtctatgtttgttcctcattgcttgctgtcctgctgactgctctttgcctggtgctggcccagtggtcagttccattgctttctggagacctgctgtggactgcagtggttgtgctgctcctgctgctcattattgggatcattgtggtcatctggagacagccacagagttccactccccttcactttaaggtgcctgctttgcctctcctcccactaatgagcatctttgtgaatatttaccttatgatgcagatgacagctggtacctgggcccgatttggggtctggatgctgattggctttgctatctacttcggctatgggatccagcacagcctggaagagattaagagtaaccaaccctcacgcaagtctagagccaaaactgtagaccttgatcccggcactctctatgtccactcagtttgacatcgtcacacctaaatgctgtctggtcccctgcacaataatggagagtactcctgaccccagtgacagctagccctcccctgtgatggtggtggtggatactaatacagttctgtacgatgtgaaggatgtgtctttgctatttcttgtctattttaacccgtctgcttctaaatgatgtctagctgcttaccaactttaaaaaatgatattaaaagaaagtagaaaaat

SEQ ID NO: 7475 - DNA, 984 bp, Homo sapiens
cacggatgtacagcagagagccaggaggtccaactgccgtagacaggaaggaattaaaattgtcctggaagacatctttactttatggagacaggtggaaaccaaagttcgagctaaaatccgtaagatgaaggtgacaacaaaagtcaaccgtcatgacaaaatcaatggaaagaggaagaccgccaaagaacatctgaggaaactaagcatgaaagaacgtgagcacggagaaaaggagaggcaggtgtcagaggcagaggaaaatgggaaattggatatgaaagaaatacacacctacatggaaatgtttcaacgtgcgcaagcgttgcggcggcgggcagaggactactacagatgcaaaatcaccccttctgcaagaaagcctctttgcaaccgggtaagtttgcttgttttccttgcttttggacatagtctgccaggtcaggacatggatacatttttctccctacggctctgtgctcaagccctgcagagggagatggcagagaggaaggctgcctacaagcatcacagtcccatccctgttggtaaccgtgttgcgcaaaaacaccttcatccccacccagtggggcccccatctaatattctaagtgtcagaggttccatatttgtaatagcaaatgggccctgactgtaaattagtgaagagtgaatgtaacttattacccacagggacaattccaaatgaaggccttaaatgatgctcagctaagctggttcttgtgtggcctctgtaccttcaaaagctgccgagtcctatgattacacgcgatgggacttctacacttgaagtgaaacacagttttaaaacttgctttgtttagaattcccacctcatttttccatggacaaaagtattctttaggtcctagtgcacttacaatttggtattacctgggagtgaaaagaaatattacagccatgcctaactgacttcttgaggtaagattgttctgtcag

SEQ ID NO: 7476 - DNA, 546 bp, Homo sapiens
agaggcgctttcggcttccaagggggaagtgctgggctataattaatgtttttattaaatttggagggaagtttttgcagcctttcgcctagcgtggccttcaggtgggtctttccaacaactttttatgtctctccagataattgcatggttgtgggtcgcaaaaactatcctgatgaaagaggtgtctccgtctctttagtcccgttaggtgcaaagcaagtctcgttgatcgccattgctagttttgcacacgtttgcgaatcagagctgcccggggtacaccgaccgcgcagggaaacatcgagagtgtaaataaatacatcgcctcttgttcggatttttgctactaccgaaaatatgtaaattgtgaactctgttggctctctttggatccaggttgatagaagtccagatcctgaggaaatctccagctaaatgctcaaaatataaaatactgagctgagatttgcgaagagcagcagcatggatggattttatgaccagcaagtgccttacatggtcaccaatagtcagcgtgggaga

SEQ ID NO: 7477 - DNA, 213 bp, Homo sapiens
gtctttaaagcacggacttacacctattgatcgaggaaattgccgctctggctgcttctccttcgccgccacgctcagacagaggtcgcttctgactagctgtgctgggcttccggaccgacacggatcccccatccccgcccgcggtcgccttgtcatgctgcccaaagtggagacggaagccctgggactggctcgatcgcatggggaaca

SEQ ID NO: 7478 - DNA, 782 bp, Homo sapiens
taggctccaaggagaagagaggagaggagaggagagctgaacagggagccacgtcttttcctgggagggctgctatctaagtcggggctgcaggtcacagcggagtgaatcagctcggtggtgtctttgtcaacgggcggccactgccggactccacccggcagaagattgtagagctagctcacagcggggcccggccgtgcgacatttcccgaattctgcaggtgtccaacggatgtgtgagtaaaattctgggcaggtattacgagactggctccatcagacccagggcaatcggtggtagtaaaccgagagtagcgactccagaagttgtaagcaaaatagcccagtataagcgggagtgcccgtccatctttgcttgggaaatccgagacagattactgtccgagggggtctgtaccaacgataacataccaagcgtgtcatcaataaacagagttcttcgcaacctggctagcgaaaagcaacagatgggcgcagacggcatgtatgataaactaaggatgttgaacgggcagaccggaagctggggcacccgccctggttggtatccggggacttcggtgccagggcaacctacgcaagatggctgccagcaacaggaaggagggggagagaataccaactccatcagttccaacggagaagattcagatgaggctcaaatgcgacttcagctgaagcggaagctgcaaagaaatagaacatcctttacccaagagcaaattgaggccctggagaaagagtttgagagaacccat

SEQ ID NO: 7479 - DNA, 1735 bp, Homo sapiens
gccggagccgactcggagcgcgcggcgccggccgggaggagccggagagcggccgggccgggcggtgggggcgccggcctgccccgcgcgccccagggagcggcaggaatgtgacaatcgcgcgcccgcgcaccgaagcactcctcgctcggctcctagggctctcgcccctctgagctgagccgggttccgcccggggctgggatcccatcaccctccacggccgtccgtccaggtagacgcaccctctgaagatggtgactccctcctgagaagctggaccccttggtaaaagacaaggccttctccaagaagaatatgaaagtgttactcagacttatttgtttcatagctctactgatttcttctctggaggctgataaatgcaaggaacgtgaagaaaaaataattttagtgtcatctgcaaatgaaattgatgttcgtccctgtcctcttaacccaaatgaacacaaaggcactataacttggtataaagatgacagcaagacacctgtatctacagaacaagcctccaggattcatcaacacaaagagaaactttggtttgttcctgctaaggtggaggattcaggacattactattgcgtggtaagaaattcatcttactgcctcagaattaaaataagtgcaaaatttgtggagaatgagcctaacttatgttataatgcacaagccatatttaagcagaaactacccgttgcaggagacggaggacttgtgtgcccttatatggagttttttaaaaatgaaaataatgagttacctaaattacagtggtataaggattgcaaacctctacttcttgacaatatacactttagtggagtcaaagataggctcatcgtgatgaatgtggctgaaaagcatagagggaactatacttgtcatgcatcctacacatacttgggcaagcaatatcctattacccgggtaatagaatttattactctagaggaaaacaaacccacaaggcctgtgattgtgagcccagctaatgagacaatggaagtagacttgggatcccagatacaattgatctgtaatgtcaccggccagttgagtgacattgcttactggaagtggaatgggtcagtaattgatgaagatgacccagtgctaggggaagactattacagtgtggaaaatcctgcaaacaaaagaaggagtaccctcatcacagtgcttaatatatcggaaattgaaagtagattttataaacatccatttacctgttttgccaagaatacacatggtatagatgcagcatatatccagttaatatatccagtcactaatttccagaagcacatgattggtatatgtgtcacgttgacagtcataattgtgtgttctgttttcatctataaaatcttcaagattgacattgtgctttggtacagggattcctgctatgattttctcccaataaaagcttcagatggaaagacctatgacgcatatatactgtatccaaagactgttggggaagggtctacctctgactgtgatatttttgtgtttaaagtcttgcctgaggtcttggaaaaacagtgtggatataagctgttcatttatggaagggatgactacgttggggaaggtatgtgtgtaatggaacagagtaaaggcttattgttgtaaaactacttagtaaaatgtggattccatctttctagaagatcgtggcataggggtatatgtttcacaattttaa

SEQ ID NO: 7480 - DNA, 2483 bp, Homo sapiens
ctgctgaaaaagcagaaagagattaccagccacagacgggtcatgagcgcggtattactgctggccctcctggggttcatcctcccactgccaggagtgcaggcgctgctctgccagtttgggacagttcagcatgtgtggaaggtgtccgacctgccccggcaatggacccctaagaacaccagctgcgacagcggcttggggtgccaggacacgttgatgctcattgagagcggaccccaagtgagcctggtgctctccaagggctgcacggaggccaaggaccaggagccccgcgtcactgagcaccggatgggccccggcctctccctgatctcctacaccttcgtgtgccgccaggaggacttctgcaacaacctcgttaactccctcccgctttgggccccacagcccccagcagacccaggatccttgaggtgcccagtctgcttgtctatggaaggctgtctggaggggacaacagaagagatctgccccaaggggaccacacactgttatgatggcctcctcaggctcaggggaggaggcatcttctccaatctgagagtccagggatgcatgccccagccagtttgcaacctgctcaatgggacacaggaaattgggcccgtgggtatgactgagaactgcgatatgaaagattttctgcagctcaagccagtaggattacttgaggaacacaatgtgggagagaaagagcgtggtcaaggacaacaccaatgtgttcagctagactggcagaaacgagccgccacgggtattttctgacctgtcatcgggggaccaccattatgacacacggaaacttggctcaagaacccactgattggaccacatcgaataccgagatgtgcgaggtggggcaggtgtgtcaggagacgctgctgctcctagatgtaggactcacatcaaccctggtggcgacctaaagctgcagcgctgttggggctcaaaattcccagaagaccaccatccactcagcccctcctggggtgcttgtggcctcctatacccacttctgctcctcggacctgtgcaatagtgccagcagcagcagcgttctgctgaactccctccctcctcaagctgcccctgtcccaggagaccggcagtgtcctacctgtgtgcagccccttggaacctgttcaagtggctccccccgaatgacctgccccaggggcgccactcattgttatgatgggtacattcatctctcaggaggtgggctgtccaccaaaatgagcattcagggctgcgtggcccaaccttccagcttcttgttgaaccacaccagacaaatcgggatcttctctgcgcgtgagaagcgtgatgtgcagcctcctgcctctcagcatgagggaggtggggctgagggcctggagtctctcacttggggggtggggctggcactggccccagcgctgtggtggggagtggtttgcccttcctgctaactctattacccccacgattcttcaccgctgctgaccacccacactcaacctccctctgacctcataacctaatggccttggacaccagattctttcccattctgtccatgaatcatcttccccacacacaatcattcatatctactcacctaacagcaacactggggagagcctggagcatccggacttgccctatgggagaggggacgctggaggagtggctgcatgtatctgataatacagaccctgtcctttctcccagtgctgggatttctccatgtgagggggcagcaggacacccagggatctagcgtgggggaggagaggagcctaatgagaaaatgaccatctaaagcctgcccttcattggtctggttcacgtctccaaaccagcttggatggtagcagagacttcagggtgctccagccaaacgtatttgggcatcaccatgacctgggaggggaagatgcactgagacgtatgaggcttccagcctagcagccagggccctagcacaaacaggaggctcgccccatctgagcaactgcaggagaggttagtacagtcatgcattgcttaacgacagggacgtgtcgttagaaatgtgtcgttaggtgattttatgaccataggaacattgtagcgtgcacttacaccaacccagatggtacagcccaatacacacccaggatggacgctagagtcgactgctcctaggctacaagcctgcagtgcatgttatggtgtgaatactgcaggcaatcttaacaccacggcaagtatttgtgcatctacacacatctaaacatagaaaaggtacagcataaatacactattgtcatctcagcagaccaccgttctatacgcaattcgtcgctgacccaaacgttgctatgtagcatctgcgtatcgtgggataattgacatgagggcttgagagaactccagaaaaaaatgggttagcattttcccagagctgttatcattgggtctctcttaccaccata

SEQ ID NO: 7481 - DNA, 43815 bp, Homo sapiens; identical to SEQ ID NO: 2301

SEQ ID NO: 7482 - DNA, 4697 bp, Homo sapiens
gtgatgataataatacgcgggcttatataaccgtcttcatcttgcgagcacttcgcagaccgtcgctaatgaatcttggggccggtgtcgggccggggcggcttgatcggcaactaggaaaccccaggcgcagaggccaggagcgagggcagcgaggatcagaggccaggccttcccggctgccggcgctcctcggaggtcagggcagatgaggaacatgactctcccccttcggaggaggaaggaagtcccgctgccaccttatctctgctcctctgcctcctccctgttcccagagctttttctctagagaagattttgaaggcggcttttgtgctgacggccacccaccatcatctaaagaagataaacttggcaaatgacatgcaggttcttcaaggcagaataattgcagaaaatcttcaaaggaccctatctgcagatgttctgaatacctctgagaatagagattgattattcaaccaggatacctaattcaagaactccagaaatcaggagacggagacattttgtcagttttgcaacattggaccaaatacaatgaagtattcttgctgtgctctggttttggctgtcctgggcacagaattgctgggaagcctctgttcgactgtcagatccccgaggttcagaggacggatacagcaggaacgaaaaaacatccgacccaacattattcttgtgcttaccgatgatcaagatgtggagctggggtccctgcaagtcatgaacaaaacgagaaagattatggaacatgggggggccaccttcatcaatgcctttgtgactacacccatgtgctgcccgtcacggtcctccatgctcaccgggaagtatgtgcacaatcacaatgtctacaccaacaacgagaactgctcttccccctcgtggcaggccatgcatgagcctcggacttttgctgtatatcttaacaacactggctacagaacagccttttttggaaaatacctcaatgaatataatggcagctacatcccccctgggtggcgagaatggcttggattaatcaagaattctcgcttctataattacactgtttgtcgcaatggcatcaaagaaaagcatggatttgattatgcaaaggactacttcacagacttaatcactaacgagagcattaattacttcaaaatgtctaagagaatgtatccccataggcccgttatgatggtgatcagccacgctgcgccccacggccccgaggactcagccccacagttttctaaactgtaccccaatgcttcccaacacataactcctagttataactatgcaccaaatatggataaacactggattatgcagtacacaggaccaatgctgcccatccacatggaatttacaaacattctacagcgcaaaaggctccagactttgatgtcagtggatgattctgtggagaggctgtataacatgctcgtggagacgggggagctggagaatacttacatcatttacaccgccgaccatggttaccatattgggcagtttggactggtcaaggggaaatccatgccatatgactttgatattcgtgtgcctttttttattcgtggtccaagtgtagaaccaggatcaatagtcccacagatcgttctcaacattgacttggcccccacgatcctggatattgctgggctcgacacacctcctgatgtggacggcaagtctgtcctcaaacttctggacccagaaaagccaggtaacaggtttcgaacaaacaagaaggccaaaatttggcgtgatacattcctagtggaaagaggcaaatttctacgtaagaaggaagaatccagcaagaatatccaacagtcaaatcacttgcccaaatatgaacgggtcaaagaactatgccagcaggccaggtaccagacagcctgtgaacaaccggggcagaagtggcaatgcattgaggatacatctggcaagcttcgaattcacaagtgtaaaggacccagtgacctgctcacagtccggcagagcacgcggaacctctacgctcgcggcttccatgacaaagacaaagagtgcagttgtagggagtctggttaccgtgccagcagaagccaaagaaagagtcaacggcaattcttgagaaaccaggggactccaaagtacaagcccagatttgtccatactcggcagacacgttccttgtccgtcgaatttgaaggtgaaatatatgacataaatctggaagaagaagaagaattgcaagtgttgcaaccaagaaacattgctaagcgtcatgatgaaggccacaaggggccaagagatctccaggcttccagtggtggcaacaggggcaggatgctggcagatagcagcaacgccgtgggcccacctaccactgtccgagtgacacacaagtgttttattcttcccaatgactctatccattgtgagagagaactgtaccaatcggccagagcgtggaaggaccataaggcatacattgacaaagagattgaagctctgcaagataaaattaagaatttaagagaagtgagaggacatctgaagagaaggaagcctgaggaatgtagctgcagtaaacaaagctattacaataaagagaaaggtgtaaaaaagcaagagaaattaaagagccatcttcacccattcaaggaggctgctcaggaagtagatagcaaactgcaacttttcaaggagaacaaccgtaggaggaagaaggagaggaaggagaagagacggcagaggaagggggaagagtgcagcctgcctggcctcacttgcttcacgcatgacaacaaccactggcagacagccccgttctggaacctgggatctttctgtgcttgcacgagttctaacaataacacctactggtgtttgcgtacagttaatgagacgcataattttcttttctgtgagtttgctactggctttttggagtattttgatatgaatacagatccttatcagctcacaaatacagtgcacacggtagaacgaggcattttgaatcagctacacgtacaactaatggagctcagaagctgtcaaggatataagcagtgcaacccaagacctaagaatcttgatgttggaaataaagatggaggaagctatgacctacacagaggacagttatgggatggatgggaaggttaatcagccccgtctcactgcagacatcaactggcaaggcctagaggagctacacagtgtgaatgaaaacatctatgagtacagacaaaactacagacttagtctggtggactggactaattacttgaaggatttagatagagtatttgcactgctgaagagtcactatgagcaaaataaaacaaataagactcaaactgctcaaagtgacgggttcttggttgtctctgctgagcacgctgtgtcaatggagatggcctctgctgactcagatgaagacccaaggcataaggttgggaaaacacctcatttgaccttgccagctgaccttcaaaccctgcatttgaaccgaccaacattaagtccagagagtaaacttgaatggaataacgacattccagaagttaatcatttgaattctgaacactggagaaaaaccgaaaaatggacggggcatgaagagactaatcatctggaaaccgatttcagtggcgatggcatgacagagctagagctcgggcccagccccaggctgcagcccattcgcaggcacccgaaagaacttccccagtatggtggtcctggaaaggacatttttgaagatcaactatatcttcctgtgcattccgatggaatttcagttcatcagatgttcaccatggccaccgcagaacaccgaagtaattccagcatagcggggaagatgttgaccaaggtggagaagaatcacgaaaaggagaagtcacagcacctagaaggcagcgcctcctcttcactctcctctgattagatgaaactgttaccttaccctaaacacagtatttctttttaacttttttatttgtaaactaataaaggtaatcacagccaccaacattccaagctaccctgggtacctttgtgcagtagaagctagtgagcatgtgagcaagcggtgtgcacacggagactcatcgttataatttactatctgccaagagtagaaagaaaggctggggatatttgggttggcttggttttgattttttgcttgtttgtttgttttgtactaaaacagtattatcttttgaatatcgtagggacataagtatatacatgttatccaatcaagatggctagaatggtgcctttctgagtgtctaaaacttgacacccctggtaaatctttcaacacacttccactgcctgcgtaatgaagttttgattcatttttaaccactggaatttttcaatgccgtcattttcagttagatgattttgcactttgagattaaaatgccatgtctatttgattagtcttatttttttatttttacaggcttatcagtctcactgttggctgtcattgtgacaaagtcaaataaacccccaaggacgacacacagtatggatcacatattgtttgacattaagcttttgccagaaaatgttgcatgtgttttacctcgacttgctaaaatcgattagcagaaaggcatggctaataatgttggtggtgaaaataaataaataagtaaacaaaa

SEQ ID NO: 7483 - DNA, 1756 bp, Homo sapiens
ctctccccgcccccgcggggcggcgcgcactcacccacccgcgccggagcggacctttggcttggcttgtcagggcttgtccaggagttccgctcctctctccaaccggggtccccctccagcgaccctaaagcttcccagacttccgcttcaattcctgtccgcaccccacgcccacctcaacgtggagcgcagtggtctccgaggagcgccggagctgccccgcctgcccagcggggtcagcacttcgcatcaaggcccaagaaaagcaagtcctccagcgttctgagcacccgggcctgagggaaggtcctaacagcccccgggagccagtctccaacgcctcccgcagcagcccgccgctcccaggtgcccgcgtgcgccgctgccgccgcaatcccgcacgcgtcccgcgcccgccccactttgcctatccccgggactaagacgggaatcctgtgaagcagctccagctatgtgtgaagaagaggacagcactgccttggtgtgtgacaatggctctgggctctgtaaggccggctttgctggggacgatgctcccagggctgttttcccatccattgtgggacgtcccagacatcagggggtgatggtgggaatgggacaaaaagacagctacgtgggtgacgaagcacagagcaaaagaggaatcctgaccctgaagtacccgatagaacatggcatcatcaccaactgggacgacatggaaaagatctggcaccactctttctacaatgagcttcgtgttgcccctgaagagcatcccaccctgctcacggaggcacccctgaaccccaaggccaaccgggagaaaatgactcaaattatgtttgagactttcaatgtcccagccatgtatgtggctatccaggcggtgctgtctctctatgcctctggacgcacaactggcatcgtgctggactctggagatggtgtcacccacaatgtccccatctatgagggctatgccttgccccatgccatcatgcgtctggatctggctggccgagatctcactgactacctcatgaagatcctgactgagcgtggctattccttcgttactactgctgagcgtgagattgtccgggacatcaaggagaaactgtgttatgtagctctggactttgaaaatgagatggccactgccgcatcctcatcctcccttgagaagagttacgagttgcctgatgggcaagtgatcaccatcggaaatgaacgtttccgctgcccagagaccctgttccagccatccttcatcgggatggagtctgctggcatccatgaaaccacctacaacagcatcatgaagtgtgatattgacatcaggaaggacctctatgctaacaatgtcctatcagggggcaccactatgtaccctggcattgccgaccgaatgcagaaggagatcacggccctagcacccagcaccatgaagatcaagatcattgcccctccggagcgcaaatactctgtctggatcggtggctccatcctggcctctctgtccaccttccagcagatgtggatcagcaaacaggaatacgatgaagccgggccttccattgtccaccgcaaatgcttctaaaacactttcctgctcctctctgtctctagcacacaactgtgaatgtcctgtggaattatgccttcagttcttttccaaatcattcctagccaaagctctgactcgttacctatgtgttttttaataaatctgaaataggctactggt

SEQ ID NO: 7484 - DNA, 2027 bp, Homo sapiens
agctcctgggggctccaggcatccctgggcttgtggccgcgtcattccaggctctgtctccgtctccacgtggccttctcctctgtgtctgtgtctcctctcctgtctcttagaaggacacctgtcgaccactgcttgagataatttttatgaacagggtgagggtggccccctaactggccaggcttgggccacacccctctcttgggtgattgacaggctttggccacacacccccatcttcagtgattgacaggcctgggcatcattcattacttttctctacatttgcagaagagaatcttgtgatactatacaatatatcgtatataattattaaatatacatacaatataacatgtttaatttatgctgaggcaggaggatttcttgagtctaggacttggagaccagcctgagcaacaaactgcaaagcatacgtgctatttccacactcttcttttgcagcagggcaggagccacacactcaaccactttgggttttttttttttttttcaccaaatggcatttcatgttaattcttctggccacagctctgacgtctgaccccaccccagctcaggggcccaagagatgctttagctcatgttccatctgtcttcctgaagaccaggtctcctcctctgtgatggggtgggaggtccgtgacggcaaggcaatgaggggcacgtgcaggcattttaaggaatcgctcttcatccacagctggtcactaaccatgatgagaccactgtccctttccacgacaccagcttcttgctaggaacatctgcctggggtcttttctctccccgaaagcctcttgcagacattctttggaaagtactcctgagctctgtgtgtttgttgaaggctgctcttgtcacacagttgcttgagggcaggtttctcagccttagcactgctgattatcctataatcttgtgcttttcatgctttatctttcttttaaggttcttcctctcttttatttggtatgatgacgctttctctaatttctttgaagtctgttggttaaaacttttcctctcttttctcggtgtattggtttgcgacagctgccataactaaggtggttatagccagaagacaatagctggcaaaaaagggtctgtcaccggcatgcaatccctgctgcccacgaggagatgccttttgtctatttctcatcccaaccctgtaaggtccacccggaacaagactgtagtgatcactgcactcagcatctgaaccctttagaaaggggttcccagggcggaaggagaggagagagggaaggagaggagagagggaaggggagagggaaggagaggggagagggaaggagaaggaaggggaggggagaggggagagggaaggggaggggagaggggagagggaaggagagggaaaataaaaatattagctgggcagggtggcatgcacctgcagtcccaggtactcaggaggattgcttgaggccaggagtttgagaccagcctgggaaatgtagcaaaactgtgtatctataaaaaataaaaatgttagctgggctaacacaggtctattgactcacacacatgttttaagatggaaaactttacttctgttcttggcaggacatggagagagggagggattccaaaaagtctcagcctccatcaaggcgtggcagctgctgcctgcgccattgcaggtcttggcgccgcaggcggggtggggaggggcggggcgagcgccgggggcggggacggggcccgggaggcggagctgggggcggtgcttcaccaagcggccggggcggtgcccgggggggaggcgggcgggggtgtggcctgggcgtggcctcacggggagctcaatggcggcgtggcatgggcgtggcctggcggagagggcaaggaggtgtggcctgggcgtggcctggcggagcggtcaatggcggcgtgacatgggcgtggcctggcggagagggcaatggaggtgtggcctgggcgtggcctgacggagagggcaatggaggcgt

SEQ ID NO: 7485 - DNA, 472 bp, Homo sapiens
gagatgtaactgatgagcatggggaaagaggatcttttgctgaaacagatgaacacacgggggttgataccaaggagctagaagatattgcagctgacattaaagagcatcttgctgcaaagagaaaaaggattgaaaagattgcaaaagcttgcagcgaaataaagaacagaattaaaaatgttttgagaacaacacaactaaaaaggcagaaacgtgattatagaatttctctgaagttgccgaatgtccttgaagagttcatcacagatgagcagaaagatgaggaaggagatggagaaaaggaagaacaaattaaaatatttcaagagcaacaaaagaggtggcaacaagatgggaaaggaactgaaagagattgagccaccacacgagcaattcacaaaggtctgttctatttggtaacacaatacgttcttataaaatacaacacatgcataaaaatagaagacaa

SEQ ID NO: 7486 - DNA, 4495 bp, Homo sapiens
ttccttattcctgctccctccacaaacgcgtcctcatccaatccagtggaacccagccgggccaaaaggacacgagaactgcagtctggaccgtggtgggtttgtcttccagctgttgaccgagacagtctttcaatagcctcatctgctgttaaatgaaaggatttgagcaccccctccacgcctaacattctggtatgaggtgcctgcctcccggacatttcagccttcacatacagttagaccaacttgaaaccgaattctgccttgtctgtttattgctgtgggacctttgagaacctctctctagactccagttgcttctcttctccacctgtgaacttcctccaagaattgccaagctaccggtccattgcacgtaggagaacgactgtccattcccgggacaagcaaagcggaactttgctaaagccaaccgactcttacagctcccagctggaggacagaatcgctgaaaacctcagcagccattctcttcgaaattatgcactgaacatctctgagaagcggagactaagggacattcaagagacacaaatgaagtatctctccgaatgggaccagtggaagcggtatagcagcaagtcttggaagaggttcctagagaaggctcgagagatgacgacccacctggagctgtggcgggaggacatccgcagcatagaagggaaatttggcactgggattcagtcctatttctccttcttgagattcctggtgttgctgaatttggtgatatttctgatcatctttatgctggttttgctcccagtcttactcacgaaatacaagatcaccaacagcagcttcgtgctcattcctttcaaagacatggataaacaatgtacagtctatccagtaagcagttctggactcatttacttttacagttatatcatagacttgctttctggcactggtttcctggaggaaactagcctcttttacggacattacaccattgatggggtgaaatttcagaacttcacctatgatctgcccctggcgtatttgttaagcacaatcgcctccctggccctgagccttctttggatagtgaaaaggtcggtggaaggattcaaaatcaacctgattcggagtgaggagcactttcagagttactgcaacaagatatttgccggctgggacttctgcatcactaaccgcagcatggcggatctgaagcacagcagcttgcggtacgagctccgagcagatctggaggaagaaagaatgcggcagaaaatagcagaaaggacctcagaagaaacaatacgcatttactctttgagactgtttttgaactgtattgttctggctgttttaggggcatgcttttatgcaatatacgtagcaactgtcttctcgcaagagcacatgaaaaaggaaatcgacaagatggtttttggagagaacctcttcatattgtatctaccgtctattgtgatcacgctggccaattttatcaccccaatgatctttgccaagatcatccgctatgaggattattctccaggctttgagatccgtctgacaatccttaggtgtgtctttatgcggctggccaccatatgtgtcctggtgttcacgctgggctccaagatcacatcctgtgatgatgacacatgtgacctttgcggctacaaccagaaactctacccgtgctgggagacccaagttgggcaggaaatgtacaagctgatgatcttcgacttcatcatcatcttggctgtgacactcttcgtggattttcctagaaagctcctggtgacctactgttcctcttgcaagctgattcagtgctgggggcagcaggagtttgccattcctgataacgtcctggggatagtttacgggcaaaccatctgctggatcggagcctttttctcaccccttctccctgcaattgcaaccctgaaattcattatcatcttctatgtgaaagagtggagtctgctttacacctgcagaccctcccccaggccgttcagagcatccaattctaatttcttcttcctgttggtgttgttgatcgggctgtgtttggcaataatacctctgacaatcagcatatcacgcatcccttcctcgaaagcctgtgggccgttcaccaacttcaacaccacctgggaggtcatccccaagacggtgagcaccttccccagctcgctgcagtccttcatccatggtgtcacatccgaagcctttgcagttcctttcttcatgattatttgcctcatcatgttttacttcattgccttagctggagcacacaaacgggtggtcatccagctccgagagcagctatccctggaaagtcgtgacaagtgctacctaatccagaaactaacagaagcccaaagggacatgaggaactaactagactgagcgtgaagatggtgctgcctgttgcttctaagctgacctagtgattctgctgagcctacagagtctacctgggttttgagtggacatttaaaaatatatttttcttgagtttaggcttttccatatgtgcagctgtgtttacctaacccagcccttaattagggcttcagtgacttagaaaagcaggggaaacccaaggctttgcctgcagaccggccactctgtgacaactctaccaaaaaccaacaagccattcaagcttttacaagaatgaaagagcggagacggtagtttagtatttgagccacgagtttatgtgcacaagtgttttgggttgtggactgaagctcagcctgttaatcagaccagcccatgagtgtataacaaacagaattggaggctggtttcttaaacacacacgtccacattttttagggttgttttcctgtgcttacaatttttaatgcatgtgcctttatttcacaaaacatgtggctgggcgcagcggctcacgcctgttatcccaacactttgggaggccgaggcaggcggagcacctaagttggggagttcaagaccagcctgaccaacgtggagaaactccgtctccactaaaatacaaaattagctgggtgtggtggcacatgcctgtaatatcagctactcaggaggctgaggcaggagaattgcttgaacccaggaggtggagtttgcagtgagctgagatcacaccattgcactccagcctgggcaaaaagagcaaaactctccctaaaaaaaaaatgtagaatatctcttaagatttccgttatggtaaaaaccatatgcaataaatacctcattgtaagcttacccaaaattgatagatgtcaaccttttaacagaagaacagaagtttaagttattgtttaatgtaatcagttttcattttaatatctttgaaatctttttcaaaggactgtagttttgtaatggacttttcaagccttccttccattgtttttcttccgttcactggctccacacgtttcctggggagtagcctggaatttaaagttgggtgcaggttttagaaagctgttgctgttaacaataattctcccggccatctccactccactactcaaaaatgcctgaatccttgctcagaggagcaaaggtatcttctcgtccctttcttacagccattttcttgcttttccacaaagatattatttaaagtggaatatttttgtaactgggataccaatgagcttttcggtcttttcctgacttggtaaggtttatgggtttctaaatctaataactacagtcataccaccctgaaaatgcctgatctcgtctaaatctaataactggtgtcatggaattttgagtaaccaaagattcattccagtctcacttaaaaaaataaattctgctgggcacagtggctcatgcctgcaatcccagaactttgggagtccaaggagggcagatcacctgaagtcagaagtttgagaccagcctggtcaatgtggcaagaccccgtctctactaaaagtacaaaaattagccaggcatggtggcgtgtgcctgtaatcccagctacttgggaggctgaggcatgagaatcacttgaacctgggaggtgaaggctgcagtgtgcgagaccgtgccactgtactccagcctaggtgacagagggagaccctatctcaaaaaaaaagataggtgaaaagaaaaaaaaagttgtaattgtaaacatttctgcccagtgcctttatatttatataacattttcactgtgaccagacttgatgatattcaagttttctatttgtgtgtgtgtgtgtgtgtgtgtgtgatgaacacaacgaaaacgtactgcgttttttttcctattataaaagtgatactgaaatatgctaattaatatattaattttagttaaatgctgctaatatgcatacctcttacttgaaggtttttaatatgttttgataactttaataacttcaggtgatgtctgtataacttttaaagtgcagctctctctaacaaatgtgccttacaactcctgattaaacggcgtcttgaaggtttt

SEQ ID NO: 7487 - DNA, 1280 bp, Homo sapiens
ttttaatggtcagactctattacaccccacattctcttttcttttattcttgtctgttctgcctcactcccgagctctactgactcccaacagagcgcccaagaagaaaatggccataagtggagtccctgtgctaggatttttcatcatagctgtgctgatgagcgctcaggaatcatgggctatcaaagaagaacatgtgatcatccaggccgagttctatctgaatcctgaccaatcaggcgagtttatgtttgactttgatggtgatgagattttccatgtggatatggcaaagaaggagacggtctggcggcttgaagaatttggacgatttgccagctttgaggctcaaggtgcattggccaacatagctgtggacaaagccaacctggaaatcatgacaaagcgctccaactatactccgatcaccaatgtacctccagaggtaactgtgctcacaaacagccctgtggaactgagagagcccaacgtcctcatctgtttcatagacaagttcaccccaccagtggtcaatgtcacgtggcttcgaaatggaaaacctgtcaccacaggagtgtcagagacagtcttcctgcccagggaagaccaccttttccgcaagttccactatctccccttcctgccctcaactgaggacgtttacgactgcagggtggagcactggggcttggatgagcctcttctcaagcactgggagtttgatgctccaagccctctcccagagactacagagaacgtggtgtgtgccctgggcctgactgtgggtctggtgggcatcattattgggaccatcttcatcatcaagggattgcgcaaaagcaatgcagcagaacgcagggggcctctgtaaggcacatggaggtgatggtgtttcttagagagaagatcactgaagaaacttctgctttaatggctttacaaagctggcaatattacaatccttgacctcagtgaaagcagtcatcttcagcattttccagccctatagccaccccaagtgtggatatgcctcttcgattgctccgtactctaacatctagctggcttccctgtctattgccttttcctgtatctattttcctctatttcctatcattttattatcaccatgcaatgcctctggaataaaacatacaggagtctgtctctgctatggaatgccccatggggcatctcttgtgtacttattgtttaaggtttcctcaaactgtgatttttctgaacacaataaactattttgatgatcttgggtggaa

SEQ ID NO: 7488 - DNA, 610 bp, Homo sapiens
caggagatggcgaatattttggctcagaagcaactgcgttccatcattttaacacatgtcatccgagcccagcgggccatcaacaatgagatggcgcaccagctgtatgttctacaagtgctcacctttaacctcctggaagacaggatgatgaccaaaatggacccccaggaccaggctcagagggacatcatatttgaacttcgaagaattgcttttgatgctgagtctgaacctaacaacagcagtggcagcatggagaaacgcaagtccatgtacacgcgagattataagaagcttgggttcattgtaagtaagctatctccagtatgcgctctccctccagcctccccgggcctgacctcagccacataactgatgtctcttccgagcgtgtggtcctcttgcgctttacggaatagtttccacatttccagatgtttagctggtttaaacaggatcacatgaaaatctcttctggcttcagtgaaatggaataacttgcacaagtgtgactaatactgcatttgtttattcagttctgattaagtgtaaccgagagtagttagcccggaatgtatctcgacttcattaaatctatttcacaaga

SEQ ID NO: 7489 - DNA, 1498 bp, Homo sapiens
agtctccgctccgcgaatctcctccggccactgccgccgcggtcgcctctcacccgcccggccgctccagcccgaggcgccccgaccccgcgccactccgcgcccggccagccgcccgcagccatggggctcctgcccaagctcggcgcgtcccagggcagcgacacctctactagccgagccggccgctgtgcccgctcggtcttcggcaacattaaggtgtttgtgctctgccaaggcctcctgcagctctgccaactcctgtacagcgcctacttcaagagcagcctcaccaccattgagaagcgctttgggctctccagttcttcatcgggtctcatttccagcttgaatgagatcagcaatgccatcctcatcatctttgtcagctactttggcagccgggtgcaccgtccacgtctgattggcatcggaggtctcttcctggctgcaggtgccttcatcctcaccctcccacacttcctctccgagccctaccagtacaccttggccagcactgggtttccatgcatctttctgaggctcctgatgaactcactcttcgtcctggtggtcctggcccagtgcaccttctcctccgtcattgctggcctctccaccttcctcaacaagttcctggagaagcagtatggcacctcagcagcctatgccaacttcctcattggtgctgtgaacctccctgctgcagccttggggatgctgtttggaggaatcctcatgaagcgctttgttttctctctacaagccattccccgcatagctaccaccatcatcaccatctccatgatcctttgtgttcctttgttcttcatgggatgctccaccccaactgtggccgaagtctacccccctagcacatcaagttctatacatccgcagtctcctgcctgccgcagggactgctcgtgcccagattctatcttccacccggtctgtggagacaatggaatcgagtacctctccccttgccatgccggctgcagcaacatcaacatgagctctgcaacctccaagcaactgatctatttgaactgcagctgtgtgaccgggggatccgcttcagcaaagacaggatcgtgccctgtcccctgtgcccacttcctgctcccggccatcttcctcatctccttcgtgtccctgatagcctgcatctcccacaaccccctctacatgatggttctgcggtgagtggcaaacctctgtgagtctggggcgtggcttctccttccccacatctccctttgactttgcgcctagttgcctgtttctcatctctccccccttttgtggccctcagagtcctttaaatgacaatgtgcaaggttcttttgctgaggggaaataatactaatggcaacagtgctgggagccctgcccagggaggctctgtgctgagctcctcattgcagggcctcattcagtcccacagcgtccatgtgacacaggccctgttggcgcctccactctgcacattgga

SEQ ID NO: 7490 - DNA, 4147 bp, Homo sapiens
cccgccccttcgcggcgcttcctagttcggctggttcttctgtcgccggcttcagcagcccgcgcccgggcaggaatagaagatgaacaaacccataacaccatcaacatatgtgcgctgcctcaatgttggactaattaggaagctgtcagattttattgatcctcaagaaggatggaagaagttagctgtagctattaaaaaaccatctggtgatgatagatacaatcagtttcacataagatgctgttcccaaaactgctaatacactaccttctaaagaagctataacagttcagcaaaaacagatgcctttctgtgacaaagacaggacattgatgacacctgtgcagaatcttgaacaaagctatatgccacctgactcctcaagtccagaaaataaaagtttagaagttagtgatacacgttttcacagtttttcattttatgaattgaagaatgtcacaaataactttgatgaacgacccatttctgttggtggtaataaaatgggagagggaggatttggagttgtatataaaggctacgtaaataacacaactgtggcagtgaagaagcttgcagcaatggttgacattactactgaagaactgaaacagcagtttgatcaagaaataaaagtaatggcaaagtgtcaacatgaaaacttagtagaactacttggtttctcaagtgatggagatgacctctgcttagtatatgtttacatgcctaatggttcattgctagacagactctcttgcttggatggtactccaccactttcttggcacatgagatgcaagattgctcagggtgcagctaatggcatcaattttctacatgaaaatcatcatattcatagagatattaaaagtgcaaatatcttactggatgaagcttttactgctaaaatatctgactttggccttgcacgggcttctgagaagtttgcccagacagtcatgactagcagaattgtgggaacaacagcttatatggcaccagaagctttgcgtggagaaataacacccaaatctgatatttacagctttggtgtggttttactagaaataataactggacttccagctgtggatgaacaccgtgaacctcagttattgctagatattaaagaagaaattgaagatgaagaaaagacaattgaagattatattgataaaaagatgaatgatgctgattccacttcagttgaagctatgtactctgttgctagtcaatgtctgcatgaaaagaaaaataagagaccagacattaagaaggttcaacagctgctgcaagagatgacagcttcttaaaactttattggaaaagactcttgactttttatatacacctatctcaaccatttttttaactgatttttttcctaaatattcttctttacctttaacaaggcataggctgttgcaggacagtggttattaaagcatgggttgaacttccaaaatataaaaatagagccaccatatcaacacttagccctacccattagtatcacccccagttcttacagtaatccctgagaaatctccttcaagcatcaccaaacacagtttgaaaattacagggttagcaaaaagagcctgggctgtatgtagggtggaaacactctgatctgaagcccagctgactccactactaatttgctgtaaagctttggacatacacttagctgctgtgagccactaataacattgggctaatatctgctgtgcttctctgacaggtagtcatgaaaatcaaatgatgcaaaatatatacaagcactttgtaaattgtaaaatgatacaaaatttaaagtttatagagccagttacaaaatcctattagtcatatatttatagattgtgttcacagcaatcatttaaccacaaataaaatatcccttgatgatactgccataatgatatgtccattattagattatgttacatgacaaagttgaaggaatttggcagatgcagttaaggttcctaaacaactcactttgagactgttgaaagggcctgacctaatcaagtgaacccttgcaagaagaattctccttgtaagccttgaagaagtatgtgagagggccacattggctaaaacctaaaggtggcctctaggagatgagacctaccttccagttgtcagcaagcaggaaaaaaaaattgggacctcagttgcaaccacaaggaactgaattctgccaaaaatctgagtcagcttagaagagtactccaagcttcagatgataaccacagcctgggctgacacctggatttcagctttgcatgatcctcagtatgagaatctatctgttctgtgctggacttctaatatatagaactgtgagataatgggtcacattggctggatgtggtggctcatacctgtaaatcccagcactttgggaggccgaggcaggcagatcacctgaggtcaagagttcaagaccggcctggccaacatggtgaaaccccgtctctactaaaaatacaaaaattagacgagcgtggtggtggacacctgtagtcccagctacttgggaggctgaggcaggagactagctggaaccagggaggtagaggttgcagtgagctgagatcgtgccactgcactccagcctgggtgacagagtgagactccatcataaataaataaataaataaatgggtcacattaagcctttaagtttgtggtaatttattattcagtaatagaaaacaaatacagatactctcccatgatgtttttcccatgatgatttcccatgatatttacaggttttgcccacatttgaggggtatgtggaaattatacagagcatgtacagcgggaggcttatagtgtacgtactgaaatgtggggttggagccccaacacagagaccccagcaggacactgcctagtagagctatgggaagggtgctgccaccctccagacttgagaattgtagagccaccagcagcttgcactctgagcttggaaaagccacaggcactcaacttcaaccatgagggaagccacgcaccctgcaaagccacaggagtggagctgcccacggcctcgagggcccaccccttgcaccagtgtgccaggatgtgggacatggaatcaaggaatatgttagggcttttttttttttttttttgagacggagtcttgctctgttgcccaggctggagtgcagtggcacgatctcggctcactgcaagctctgcctcccaggttcacgccattcccctgcctcagcctccccagtagctgggactacaggtgcccgccaccatgcccagctaattttttttgtatttttagtagagatggggtttcactgtgttagccaggatggtcttgatctcctgacctcgtgatcacccgcctcggcctcccaaagtgccagtatttaaagtttaatgtcttcccagctgggtttcagacttgccaggatcctgttgcccctttctttagccaatttctcccttttgggacaagaatgttttacttattgcctgtaccaccaactgtatcttggaaataaataacttatattttatttcagaggctcataggcggcaggaacttaccttgagtctcaaatgagacttaggacttttgagtgatgctagaatgagttaagactttgggaagggatgattatattttgcaatgtgagaaagacattagatttggggggctgggggtagaatgacattgtttagatgtttgtctccttcaaatttcatgtttaaatgtaatccccagtgttgggggtggaggtggggcctgatgggaagtgtttgggtcatggtggatgatccctcatgaatggcttagagccactggtgatgagtgagttctcactcagttcgtgtgagatctggtggcttaaaagagtctgctccccctttgccttccattgtgattgtaaccttcctggggccttcatcaaaggccaggcaaatattggtgccgtgctagtatggcctgcagaaccgtaagccaaaacaaaccttttttctttataaattacccagcctcagttattcctttatagtgatgcaaaacgggctaactatataaatttgtaatttttaagttatagattgtttttattaaacacttatgaatactgtt

SEQ ID NO: 7491 - DNA, 16123 bp, Homo sapiens
gggagccaggaccatggacttagcaccagacagggctactggccgcccgtggctcccgttgcacactctatcagtatctcagctccttcgagtgttttggctactgtcattgcttccggggcaggcctgggtccacggggccgagccgcgccaggtgttccaagtgctggaagagcaacctccaggcactctggtaggcaccatccagacgcgccccggcttcacctacaggctcagcgaaagccacgccctgtttgccataaacagtagcaccggagccctgtacaccacctccaccatcgaccgcgagagcctgcccagcgacgtgatcaacctggtggtcctttccagcgcgcccacctaccccaccgaagtgcgagtgctggtgcgggacctcaatgacaacgcccccgttttcccggacccctctatcgtggtcactttcaaggaagacagtagcagcggacgccaagtcatcttagacaccgccaccgactcggacatcggctcaaacggtgtggaccaccgctcctaccgcatcatccgcggcaatgaggcggggcgcttccgtctggacatcaccctgaacccgagcggcgagggagcgttcctgcatctggtgtccaagggcggactggaccgtgaggtcactccgcagtaccagctcctggttgaggtggaggacaagggtgagcctaagcggcggggctaccttcaggtaaacgtgactgtgcaagacattaatgacaaccccccggtttttggcagttctcactaccaggcgggggtgcctgaggacgcggttgtgggttccagcgtcctccaggtggcggcggcggacgcggacgagggcaccaacgcggacatccgctatcgcctgcaggacgaggggacccccttccaaatggaccctgagacgggacttatcacggtgcgggagcccctggacttcgaagctcggcgccaatactcgcttacggtgcaggcgatggacagaggcgtgccttccctcactgggcgcgccgaggcgctgattcagctgctggacgtgaatgacaatgacccggtagtgaagttccgctacttcccggccacctcgcgctacgcctcggtagatgagaatgctcaagtgggcaccgtggtggctctgctcaccgtgacggacgcagattctcccgcggccaacgggaacatctccgtgcaaattctcgggggcaatgagcagcgccactttgaagtgcaaagcagcaaagtgccgaacctgagcctaatcaaggtggccagcgccttggaccgcgagcgcatcccttcctacaacctcacagtttccgtctctgataactacggggcgccccctggcgcagcagtccaggcgcgctcttctgtggcaagcctggtgatttttgttaatgacatcaatgaccatcctcctgtcttttcacagcaagtgtacagagtgaacctgagcgaggaggcgcctccgggaagctatgtgagtgggatatctgccactgatggcgactctggtctcaatgctaatctgcgttacagcattgtctctggcaatggactgggatggttccatatcagtgaacatagcggcctcgtgaccactgggtcctctgggggcctggaccgtgaacttgcttcccagattgttctgaatataagtgcccgggaccagggagttcaccccaaggtgtcctatgcccagcttgtagtaactctcctagatgtgaatgatgaaaagccagtatttagccagccagaagggtatgatgtgtctgtggttgagaatgccccaacagggacagaactgttgatgctcagggcaactgacggggacctgggtgacaacggaacagtgcgcttctccttacaagaggcagagactgaccggaggtccttccgtctggatcctgtgtctgggaggttgagtactatttcctccttggacagagaagagcaagccttctactccctgttggttctggccacagatctgggctcccctccccagtcatcaatggctcgcataaatgtgagtcttctggatataaatgataacagccctgtcttctacccggtccaatactttgctcacattaaggagaatgagcctggaggtagctacatcaccactgtgtctgccactgacccagacttgggtaccaatggtactgtcaaatatagcatatctgctggggacaggtctcggtttcaggtcaatgctcagagtggggttatttctacaagaatggccctagacagagaagaaaaaacagcttatcagttgcaaatagtagctactgatggtggcaatttacaatctcccaaccaggcaatagtaaccatcactgtattggacactcaagacaacccacctgtattcagtcaggttgcctacagctttgtggtttttgagaacgtggcgctgggatatcatgtgggtagtgtgtctgcatccaccatggatctcaattccaacatcagttatctcattactactggggatcagaaaggtatgtttgctatcaaccaggtcactgggcagcttaccacagcaaatgtgattgatagagaagagcaatccttttatcagctgaaggtagtggccagtgggggcacagtgactggagacactatggttaacataacagttaaggatttgaatgacaactctccccatttccttcaggcaatagagagtgtaaatgtggtggagaattggcaggcaggtcacagcattttccaggccaaagctgtggaccctgatgaaggtgtcaatggcatggtactctatagtctgaagcaaaaccccaagaacctgtttgctatcaatgaaaagaatggcactattagtctgcttgggcccctggatgttcatgctggctcctaccaaatagagatcttggcatctgacatgggtgtcccacagctctcctctagtgtcatcttaacagtttatgtccatgatgtaaatgacaattcaccagtgtttgaccaactctcttatgaagtcaccctttctgagtcagaacctgtgaattctcgattctttaaagtacaagcttctgataaggattcaggagcaaatggtgaaattgcatacaccattgctgaaggaaatacaggggatgcttttggcatattcccagatggtcaattgtatataaaaagtgaactggaccgtgaacttcaagacagatatgttttaatggttgttgcttctgacagagcagtggaaccccttagtgctactgtgaatgttactgtaattttagaagatgtaaatgataacagacctctttttaacagtaccaattacacattttacttcgaagaagagcagagggctgggtcgtttgtgggcaaagtaagtgctgtagataaagactttgggccaaatggagaagtaaggtattcttttgaaatggtgcagccagattttgagttgcatgccatcagtggggaaattacaaatactcatcagtttgacagggagtctcttatgaggcggagagggactgctgtgtttagctttacagtcatagcaacagatcaggggatccctcagcctctcaaggatcaggccactgtacatgtttacatgaaggatataaatgataatgctcccaaatttttaaaagacttttaccaagctacaatatcagaatcagcagccaatctgacacaagtgttaagagtatctgcctcagatgttgatgaaggtaataatggacttattcactattctataataaaaggaaatgaagaaagacagtttgctatagacagtacctctggtcaggtaacactaattggcaaattagactatgaagcaacacctgcctattcccttgtaattcaagcagtggattcagggacaatccccctcaattcaacgtgtactttaaatattgatattttagatgaaaatgacaataccccttctttccctaaatcaacactctttgttgatgttttggaaaacatgagaattggtgaactcgtgtcctctgttactgcaactgattccgattcaggtgacaatgctgatttatattacagtattactgggactaacaaccacggaacttttagcattagcccaaacactgggagtatttttcttgccaaaaaactggactttgaaacacagtctttgtataaattaaatataacagcaaaagaccaaggaagacctcctcgttcatctacaatgtcagtggttattcacgtgagggactttaatgacaatcctcctagctttcctcctggagatattttcaagtctattgttgagaacattcccatcggtacatctgtcatttcagtgactgcacatgaccctgatgcagacattaatggtcaactatcctacacaatcattcaacagatgccaagaggcaaccactttaccatagatgaagtcaaagggactatatatactaatgctgaaatagatcgggaatttgctaatctctttgagttgactgtaaaagccaatgatcaagctgtgccaatagaaactagacggtatgctttgaagaacgtgaccattttggttacagacctcaatgacaatgtcccaatgtttatatcacaaaacgcccttgctgcagacccatcagctgtgattggttccgttctgacaacaattatggctgctgacccagatgaaggtgctaatggagaaatagagtatgagatcatcaatggggacacagacaccttcattgttgatcgttatagtggagacctgagagtggcttcagcgttggtgccttcacagttgatctacaatctcatagtttcagcaacagaccttgggcctgaaaggaggaaatcgaccactgaattgaccatcattcttcagggccttgatggacctgtttttactcaacccaaatatataactattttgaaggaaggagaacccattggcacaaacgtgatatcaatagaagcagctagccccagaggatctgaggccccagtggagtattatattgtttcagttcgttgtgaagaaaaaactgttggacgcctctttactattggacgacatactggtataattcagaccgcagccattctggaccgggagcaaggagcatgtctttacctggtggatgtttatgccatagaaaaatcaactgcttttcccagaacacagagagcagaggtagaaataacacttcaggatatcaatgacaatccaccagtatttccaacggacatgctggatctcacggtagaggagaacattggagatggctctaagattatgcagctgacagccatggatgctgatgagggtgcaaatgctctcgtcacatacactatcattagtggagctgatgatagttttcgcatcgacccagaatccggagatctgatagcaaccaggcggttggacagggaacgccgctccaaatattcactgctagttcgtgctgatgatggtcttcagtcctcggatatgagaattaatatcactgtcagtgatgtgaatgaccatacacccaaattttccagacccgtgtactcttttgacattcctgaggacacaatccctggttctttggtagcagccattttagccacggatgatgactctggtgtgaatggagaaattacatatattgtgaatgaagatgatgaagatggcatctttttcctgaatcctattactggggtctttaatttgactcgattattagattatgaagtacagcaatattatatcctcactgttcgagcagaagatggtgggggacaatttactaccatcagagtttatttcaatattctagatgtaaatgataatccacctattttcagcttgaattcatacagcacatctttaatggagaatctacctgtgggatctactgttcttgtgtttaatgttactgatgcagatgatggcatcaactctcaattgacttatagcattgcttcaggtgatagccttgggcagtttactgttgacaagaatggtgtactcaaagtcctaaaagctttggatcgggaaagtcagtccttctacaacttggttgttcaagtgcatgacctgccacagattccagcctccagattcacaagcactgctcaagtctccattattttgttggatgtaaatgataacccaccgacatttctttcccctaaattgacatacattccagaaaatacacctattgatactgttgttttcaaagctcaagcaactgacccagatagtggcccaaacagctatattgagtacactctgctgaaccctttgggaaacaagttcagtattgggaccattgatggtgaagtgaggctcactggagaactggacagagaagaagtttctaattatactctaacagtggtggctacagacaaaggtcaaccatctctctcttcatctacagaggttgtagttatggtacttgacatcaatgataacaaccccatctttgcacaagctttgtataaagtggagattaatgaaaacacacttactggaacagatataatacaagtgttcgcagcagatggagatgaaggcacaaatggacaggttcgctatggcattgttaatggtaataccaatcaggaatttcggatagactctgtcacaggtgccatcactgtcgctaaacctttggatagagaaaagacccctacctaccatttaactgttcaggcaacagatcgaggcagcacacccagaactgatacctccacggtcagcattgttctactggatattaatgactttgttcctgtatttgagctatctccatattctgtaaatgtccctgagaatttagggacactacccagaacaattcttcaggtggtggcaagagatgatgatcgaggatctaacagcaaactctcatatgttctgtttggtggtaatgaagacaatgcttttactctctcagccagtggagaacttggagtaacacagagtctggatcgggaaacaaaagagcgctttgtcttaatgattacagctacagattcaggatcccctgccttgactggaactggaacaatcaacgtcatagtagatgatgtcaatgacaatgtccccacatttgccagtaaagcgtatttcacaacaattcctgaggatgcaccaactggaacagatgttttattggtaaatgcctcagatgctgatgcttcaaagaatgcagttataaggatcatcggtggaaactctcagttcacgatcaacccatcgacaggacaaatcatcaccagcgcattgttagatagggaaacaaaagataattatactttggtagtggtctgcagtgatgcgggatccccagagcctctttccagttccaccagtgtgcttgtcactgtgactgatgtcaatgacaatccaccaagatttcagcatcacccatatgtcactcacatcccatctcctactcttccaggttcctttgtctttgcggttacagtcacagatgctgatattggaccaaattctgaactgcattattctctttcgggtagaaattctgaaaaatttcacattgacccactgaggggagccattatggccgccggaccactaaacggagcttcagaagtgacattttctgtgcatgtaaaagatggtggctcatttccaaagacagattctacaacagtgactgttagattcgtgaataaggccgatttccctaaagtgagagccaaagaacaaacgttcatgtttcctgaaaaccaaccagtcagctctcttgtcaccaccatcacaggatcctctttaagaggagaacctatgtcatattatatcgcaagtgggaatcttggcaatactttccagattgatcagttaacagggcaggtgtctattagtcaacctctggattttgaaaagatacaaaaatatgttgtatggatagaggccagagacggtggtttccctcctttctcctcttacgagaaacttgatataacagtattagatgtcaatgataatgccccaatttttaaggaagacccatttatatctgaaatattggaaaacctttcccctcgaaaaatacttactgtttcggcaatggacaaggacagtggacccaatggacagttagattatgaaattgttaatggcaacatggaaaatagtttcagtatcaatcatgctactggtgaaattagaagcgttagacctttggacagggaaaaagtatctcattatgtcctaaccataaaatcatcagacaaagggtccccgtctcagagtacttcagtaaaagtcatgattaacattttagatgaaaatgataatgcccctaggttttctcagatatttagtgcccatgttcctgaaaattcccccttaggatacacagttacccgtgtcacaacttctgatgaagacattgggatcaatgcaattagtagatattctataatggatgcaagtcttccatttacaattaatcccagcacaggggatattgtcataagcagacctttaaatagggaagatacagaccgttacagaattcgagtttccgcacatgattctgggtggactgtaagtacagatgtcacaatatttgtgacagacatcaatgacaatgctccaagatttagcagaacttcctattatttagattgccctgaacttactgagattggctccaaagtaactcaggtatttgcaacagatcctgatgagggatcaaatggacaagtgttttatttcataaaatcccaatcagaatatttcaggattaatgccaccactggagagattttcaataaacagatcttaaaataccaaaatgtcactggcttcagtaatgtgaatatcaacaggcatagttttatagtgacatcttcagatcgaggtaaaccttccttaattagtgagacaacagttaccatcaatatagtggacagtaatgacaatgcacctcaatttcttaaaagtaaatatttcactccagtcaccaaaaatgttaaggttggtacgaagttaatcagagttacagcaatagatgacaaagattttggactgaattcagaagtggagtatttcatttctaatgataaccatttaggaaaatttaagttggacaatgatacggggtggatttcagtagcatcctccctgatttctgacttgaaccaaaacttttttatcacagtcactgcaaaggataagggaaaccctccactttcttcccaagcaactgttcacataactgtcactgaggaaaactaccatacacctgaattctctcaaagccacatgagtgcaaccatccctgagagccatagcattgggtccattgtcagaactgtttctgcaagagatagagatgcagcgatgaatggcttgattaagtacagcatttcttcaggaaatgaagaaggcatttttgcaatcaattcttctacaggtatattaacactagccaaagctcttgattatgagctatgccagaaacacgaaatgacgattagtgctatagatggaggatgggttgcaagaactggttactgcagtgtgaccgtaaatgtgattgatgtgaatgataattctccagtattcctctctgatgactatttccctactgttttggaaaatgccccaagtggaacaacagttatccacctaaatgcaacagatgctgactctggaacaaatgctgtgattgcgtatactgtacagtcatctgacagtgacctctttgtcattgaccctaacacaggagtcataaccactcaaggcttcttggattttgaaaccaagcagagctaccatcttactgtgaaagccttcaatgtccccgatgaggaaaggtgtagctttgccactgttaatatacaattaaaagggacaaatgaatatgtgccccgttttgtttccaaactttactattttgaaatctcagaagcagctcctaaaggtactattgttggagaagtgtttgctagcgaccgtgatttgggcactgatggggaggtacactatttgatttttggtaatagtcgaaagaagggtttccagatcaataagaagactggacagatttatgtttctggaattcttgatcgagaaaaagaagaaagggtgtctttgaaggtattggccaagaactttggcagcattagaggtgcagatatagatgaggtcactgtaaatgtcaccgtgcttgatgcaaatgacccacccatttttactctaaacatctacagtgtgcagatcagtgaaggggtcccaataggaactcatgtgacctttgtcagtgcctttgactcagactccatccccagctggagcaggttttcttacttcatcggatcagggaatgaaaatggtgccttttctattaatccgcagacaggacagatcaccgttactgcagaattagatcgagaaacccttcccatctataatctctcagttttggctgttgattcagggaccccctcagctacaggtagtgcctctttattagtcaccctggaagatataaatgataacgggcccatgctgactgtcagtgaaggagaagtcatggaaaacaaacggccaggcactttggtgatgacccttcagtccactgaccctgatctccctccaaatcaaggtccctttacttattacttgctgagcacaggtcctgccaccagttatttcagtctgagcactgctggagttctgagcacaaccagagagattgacagagagcagattgcagacttctatctgtctgtggttaccaaggattctggtgttcctcaaatgtcttccacaggaactgtgcatatcacagttatagaccaaaatgacaatccttcacagtctcggacggtggagatatttgttaattattatggtaacttgtttcccggtgggattttaggctctgtgaagccacaggatccagatgtgttagacagcttccactgctcccttacttcaggagttaccagcctcttcagtattccagggggtacttgtgatctgaattcccagccaaggtccacagatggcacgtttgatctgactgtccttagcaatgatggagttcacagcacagtcacgagcaacatccgagttttctttgctggattttccaatgccacagtggataacagcatcttacttcgtctcggcgtaccaacagtaaaggacttcttgaccaaccactatcttcattttttacgcattgccagctcacagctgacaggcttagggactgctgtgcaactgtacagtgcatatgaagagaacaatagaacgtttcttttggcagctgtgaagcgaaatcataatcagtatgtgaatcccagtggcgtagccaccttctttgaaagcatcaaagagatccttctccggcagagtggagtaaaggtggaatctgtggatcatgactcctgtgtgcatggcccatgtcagaatggagggagctgtctacgaagattggctgtgagctccgtattaaaaagccgtgagagtcttccagtcatcatcgtggcaaatgaacctctgcagcctttcttatgcaagtgtctgccaggatatgcgggtagctggtgtgaaatagatatagatgaatgtcttccatcaccttgccacagtggtggaacctgtcacaatttagtgggaggattttcatgcagctgcccagatggcttcactggtagggcgtgtgagagagatatcaatgagtgcctgcagagtccttgcaagaatggtgccatctgccagaattttccaggaagcttcaactgtgtttgcaaaactggatacacagggaaaatgtgtgaatcttcagtcaattactgtgaatgcaacccctgctttaatggtggttcctgccaaagtggtgtggattcttattattgtcattgtccatttggtgtctttggaaaacactgcgagttgaacagttatggatttgaggagttatcatacatggaatttccaagcttggaccccaataacaactatatttatgtcaaatttgccacgattaaaagtcatgccttattgctttacaactatgacaaccagacaggcgaccgggctgagtttttggcccttgaaattgccgaagaaagactaagattctcttataatttaggcagtggtacatataagctcaccaccatgaagaaggtgtcagatggacattttcacactgtgattgccaggagagcaggaatggcagcctccttaactgtggactcctgttctgagaaccaagagccaggatattgtactgtcagtaatgtggcagtttcagatgactggactcttgatgttcagccaaatagagttacagttggaggtatcagatctctagaaccaatccttcagagaagaggacacgtggaaagccatgattttgttgggtgtataatggagtttgcagtcaatggaaggcctctggaacccagccaagctttggcagcacaaggcatcctagatcaatgccctaggctggaaggcgcttgtactcgcagcccatgccaacatggtggcacatgtatggattactggtcatggcagcagtgtcattgcaaagagggactcactgggaaatactgtgaaaaatctgttactcctgacactgccttatcattagaaggcaaagggcgcttggactaccacatgagtcagaatgagaagcgggaatatttgttaaggcaaagcttacgaggtgccatgttggagccttttggtgtgaacagtctggaagtaaaatttaggaccagaagcgagaatggcgttttaatccatatccaagaaagcagcaattacactactgtgaagattaagaatggcaaagtatattttacatccgatgcaggaattgctgggaaagtggagagaaatattcctgaagtatatgttgcagacggccactggcacacttttctaattgggaaaaatggaacagcaacagtattgtctgttgacagaatatataacagagatattatccaccctactcaggacttcggtggccttgatgtgcttactatatcacttggaggaattccacccaatcaagcacatcgagatgcccaaacagcaggttttgatggctgcattgcttctatgtggtatggtggagaaagtcttcctttcagcgggaagcatagcttggcctccatctcaaaaacagatccctcagtgaagattggctgccgtggcccgaacatttgtgccagcaacccctgctggggtgatttgctgtgcattaatcagtggtatgcctacaggtgtgtccctcctggggactgtgcctcccacccgtgccagaatggtggcagctgtgagccaggcctgcactccggcttcacctgtagctgcccagactcgcacacgggaaggacctgtgagatggtggtggcctgtcttggcgtcctctgtcctcaggggaaggtgtgcaaagctggaagtcctgcggggcatgtctgtgttctgagtcagggccctgaagagatctctctgcctttgtgggctgtgcctgccatcgtgggcagctgcgcaaccgtcttggccctcctggtccttagcctgatcctgtgtaaccagtgcagggggaagaaggccaaaaatcccaaagaggagaagaaaccgaaggagaagaagaaaaagggaagtgagaacgttgcttttgatgaccctgacaatatccctccctatggggatgacatgactgtgaggaagcagcctgaagggaacccaaaaccagatatcattgaaagggaaaacccctaccttatctatgatgaaactgatattcctcacaactcagaaaccatccccagcgcccctttggcatctccagagcaggagatagagcactatgacattgacaacgccagcagcatcgccccttcggatgcagacatcattcaacactacaagcagttccgcagccacacaccaaaattttcaatccagaggcacagtcccctaggctttgcaaggcaatcccccatgcccttaggagcaagcagtttgacttaccagccttcatatggtcaaggtttgagaaccagctccctaagccactcagcatgcccaactcccaaccctctgtctcgacacagtccagcccctttctccaaatcttctacgttctatagaaacagcccagcaagggaattgcatcttcctataagggatggtaatactttggaaatgcatggtgacacctgccaacctggcattttcaactatgccacaaggctgggaaggagaagcaagagtcctcaggccatggcatcacatggttctagaccagggagtcgcctaaagcagccgattgggcagattccactggaatcttctcctccagtcggactttctattgaagaagtggagaggctcaacacacctcgccctagaaacccaagtatctgcagtgcagaccatgggaggtcttcttcagaggaggactgcagaaggccactgtctagaacaaggaatccagcggatggcattccagctccagaatcctcttctgatagtgactcccatgaatctttcacttgctcagaaatggaatatgacagggagaagccaatggtatatacttccagaatgcccaaattatctcaagtcaatgaatctgatgcagatgatgaagataattatggagccagactgaagcctcgaaggtaccacggtcgcagggccgagggaggacctgtgggcacccaggcagcagcaccaggcactgctgacaacacactgcccatgaagctagggcagcaagcagggactttcaactgggacaaccttttgaactggggccctggctttggccattatgtagatgtttttaaagatttggcatctcttccagaaaaagcagcagcaaatgaagaaggcaaagctgggacaactaaaccagtccccaaagatggggaagcagaacagtatgtgtgaagtttatgtactggcactataaaatataaaaacaagaaataatactcaaaccattgtaaagttgctgactaggttgggtcacatttgaaaaacaggccagtatggactagtggtggagggaaaactttaaaaataataaccacaatgctgctgaaacagactcacaacaactcttaatttaaacatgtgtggttgaatttatttccctgcatgcattgtgttttgtaactagttatgtggcatgcagcatttggaaaatttttcttatttaccagtgtttgatttgtgatttttaaaaattgatacctttaccattgcagaaaagaacttgtgctttcccagtggcgtatgtgtattgtttcaactgtattattataattatattttgcattgcaagattcttgatgttaaaccaatccttgtaaagtgtaaaaaggaaccctcctatcgtggaatgaaagattaagtatattaacacttttcagaatgatagtttctgtatttgatgttgctcagaaatgtctcagtatttgagtaagttttacatgacagtgggtactgaaattaagtcattttgttcagcactttaacgctttcttatagaattgtcttaaaacttctggatccttgagcaaatgattatagtctcctgactttcatgaggcttccattaggaacagaatgattgcatgttgtccccagaacactgccaccttgctatgcgaatgatgttctcagcagcacttctaagaaacactcttaaaagttatttattgaaaatttttcgtatgcttttaatattttaaagaattgacctaaggaaagcttatgattggacttattttccaaccagataacatttactctaagtacccagtttttataatttatatgaaatcagatttcaacacttactttgtcattttgtagatcatttttttaaaatactgtgtaaaaactttttttacacctaagctgtgtttttgatactgatattttcctatgctgaatagttttcttactttcagggaaggtaagaaaatactttttttatatttgttacttatgtaacattcatatttttctcattttgatatttgtaacatactgtatgctttctacttgtaaatgtcaacaatagaattaaaatatttatttaaaata

SEQ ID NO: 7492 - DNA, 403 bp, Homo sapiens; identical to SEQ ID NO: 6648

SEQ ID NO: 7493 - DNA, 2294 bp, Homo sapiens
cctcattgcccagcggaccccagcctctgccaggttcggtccgccatcctcgtcccgtcctccgccggcccctgccccgcgcccagggatcctccagctcctttcgcccgcgccctccgttcgctccggacaccatggacaagttttggtggcacgcagcctggggactctgcctcgtgccgctgagcctggcgcagatcgatttgaatataacctgccgctttgcaggtgtattccacgtggagaaaaatggtcgctacagcatctctcggacggaggccgctgacctctgcaaggctttcaatagcaccttgcccacaatggcccagatggagaaagctctgagcatcggatttgagacctgcaggtatgggttcatagaagggcacgtggtgattccccggatccaccccaactccatctgtgcagcaaacaacacaggggtgtacatcctcacatccaacacctcccagtatgacacatattgcttcaatgcttcagctccacctgaagaagattgtacatcagtcacagacctgcccaatgcctttgatggaccaattaccataactattgttaaccgtgatggcacccgctatgtccagaaaggagaatacagaacgaatcctgaagacatctaccccagcaaccctactgatgatgacgtgagcagcggctcctccagtgaaaggagcagcacttcaggaggttacatcttttacaccttttctactgtacaccccatcccagacgaagacagtccctggatcaccgacagcacagacagaatccctgctaccactttgatgagcactagtgctacagcaactgagacagcaaccaagaggcaagaaacctgggattggttttcatggttgtttctaccatcagagtcaaagaatcatcttcacacaacaacacaaatggctggtacgtcttcaaataccatctcagcaggctgggagccaaatgaagaaaatgaagatgaaagagacagacacctcagtttttctggatcaggcattgatgatgatgaagattttatctccagcaccatttcaaccacaccacgggcttttgaccacacaaaacagaaccaggactggacccagtggaacccaagccattcaaatccggaagtgctacttcagacaaccacaaggatgactgatgtagacagaaatggcaccactgcttatgaaggaaactggaacccagaagcacaccctcccctcattcaccatgagcatcatgaggaagaagagaccccacattctacaagcacaatccaggcaactcctagtagtacaacggaagaaacagctacccagaaggaacagtggtttggcaacagatggcatgagggatatcgccaaacacccaaagaagactcccattcgacaacagggacagctgcagcctcagctcataccagccatccaatgcaaggaaggacaacaccaagcccagaggacagttcctggactgatttcttcaacccaatctcacaccccatgggacgaggtcatcaagcaggaagaaggatggatatggactccagtcatagtataacgcttcagcctactgcaaatccaaacacaggtttggtggaagatttggacaggacaggacctctttcaatgacaacgcagcagagtaattctcagagcttctctacatcacatgaaggcttggaagaagataaagaccatccaacaacttctactctgacatcaagcagagaccaagacacattccaccccagtggggggtcccataccactcatggatctgaatcagatggacactcacatgggagtcaagaaggtggagcaaacacaacctctggtcctataaggacaccccaaattccagaatggctgatcatcttggcatccctcttggccttggctttgattcttgcagtttgcattgcagtcaacagtcgaagaaggtgtgggcagaagaaaaagctagtgatcaacagtggcaatggagctgtggaggacagaaagccaagtggactcaacggagaggccagcaagtctcaggaaatggtgcatttggtgaacaaggagtcgtcagaaactccagaccagtttatgacagctgatgagacaaggaacctgcagaatgtggacatgaagattggggtgtaacacctacaccattatcttggaaagaaacaaccgttggaaacataaccattacagggagctgggacacttaacagatgcaatgtgctactgattgtttcattgcgaatcttttttagcataaaattttctactctt

SEQ ID NO: 7494 - DNA, 515 bp, Homo sapiens
attatcgcggaacacctgcccattaatcttgaccctgttaaaacaataactgcctatccagatatgccacacttctgcctgctgttggcaaccctcctggactaggctgctcttgttaatcacatggatgttatataagagttcggaccgcccagcacacaaggtcagcatgctgctcctctgtcacgctctcgctatagctgttgtccagatcgttatcttctcagaaagctgggcatttgccaagaacatcaacttctataatgtgaggcctcctctcgaccacaagtaaaacgtctttgatatactttattagagagtgattcttataaataaaaaattatttggtatacatgtgggtacctgtagttcccacgcctggaagagtatcagaatcatgatgaaaggatttttaactgcatatccctaatcacttctccagagatttaacagtcaagaggctacaccatttccaaatagcttcaagtgctttacttgtgaaaacgcaggggata

SEQ ID NO: 7495 - DNA, 1280 bp, Homo sapiens
ttttaatggtcagactctattacaccccacattctcttttcttttattcttgtctgttctgcctcactcccgagctctactgactcccaacagagcgcccaagaagaaaatggccataagtggagtccctgtgctaggatttttcatcatagctgtgctgatgagcgctcaggaatcatgggctatcaaagaagaacatgtgatcatccaggccgagttctatctgaatcctgaccaatcaggcgagtttatgtttgactttgatggtgatgagattttccatgtggatatggcaaagaaggagacggtctggcggcttgaagaatttggacgatttgccagctttgaggctcaaggtgcattggccaacatagctgtggacaaagccaacctggaaatcatgacaaagcgctccaactatactccgatcaccaatgtacctccagaggtaactgtgctcacgaacagccctgtggaactgagagagcccaacgtcctcatctgtttcatcgacaagttcaccccaccagtggtcaatgtcacgtggcttcgaaatggaaaacctgtcaccacaggagtgtcagagacagtcttcctgcccagggaagaccaccttttccgcaagttccactatctccccttcctgccctcaactgaggacgtttacgactgcagggtggagcactggggcttggatgagcctcttctcaagcactgggagtttgatgctccaagccctctcccagagactacagagaacgtggtgtgtgccctgggcctgactgtgggtctggtgggcatcattattgggaccatcttcatcatcaagggagtgcgcaaaagcaatgcagcagaacgcagggggcctctgtaaggcacatggaggtgatggtgtttcttagagagaagatcactgaagaaacttctgctttaatgactttacaaagctggcaatattacaatccttgacctcagtgaaagcagtcatcttcagcgttttccagccctatagccaccccaagtgtggttatgcctcctcgattgctccgtactctaacatctagctggcttccctgtctattgccttttcctgtatctattttcctctatttcctatcattttattatcaccatgcaatgcctctggaataaaacatacaggagtctgtctctgctatggaatgccccatggggcatctcttgtgtacttattgtttaaggtttcctcaaactgtgatttttctgaacacaataaactattttgatgatcttgggtggaa

SEQ ID NO: 7496 - DNA, 5708 bp, Homo sapiens
caggacacgaggaaactgttaatgacttgggctttggaagtagctgttgtaatgaagaagtccgaaacatatgcacctttattctgtcttccgtctttccataaattttgcaaaggccttttagccgacactctcgttgaagatgtgaatatctgtctgcaggcatgcagcagtctacatgctctatcctcttccttgccagatgatcttttacagagatgtgttgatgtttgccgtgtccaactagtgcaccgtggaacttgtattcgacaagcatttggaaaactgttgaaatcaattcctttaggtgttttcctaagcgataacaatcacacagaaattcaagaaatttctttagcattaagaagtcacatgagtaaagcaccaagtaatacattccacccccaagatttctctgatgttattagttttattttgtatgggaactctcatagaacagggaaggacaattggttggaaagactgttctatagctgccagagactggataagcgtgaccagtcaacaattccacgcaatctcctgaagacagatgctatcctttggcagtgggccatatgggaagctgcacaattcactgttctttctaagctgagaaccccactgggcagagctcaagacaccttccagacaattgaaggtatcattcgaagtctcgcaggtcacacattaaaccctgatcaggatgttagtcagtggacaactgcagacagtgatgaaggccatggtaacaaccaacttagacttgttcttcttctgcagtatctggaaaatctggagaaattaatgtataatgcatacgagggatgtgctaatgccttaacttcacctcccaaggtcattagaacttttttgtataccaatcgccaaacttgtcaggactggctaacgcggattcgactctccatcatgagggtaggattgttggcaggccagcctgcagtgacagtgagacatggctttgacttgcttacagagatgaaaacaaccagcctatctcaggggaatgaattggaagtaagcattatgatggtggtagaagcactatgtgaacttcattgtcctgaagctatacagggaattgctgtctggtcatcatctattgttggaaaacatcttctgtggattaactcagtggctcaacaggctgaagggaggtttgaaaaggcctctgtggagtaccaggaacacctgtgtgccatgacaggtgttgattgctgcatctccagctttgacaaatcggtgctcaccttagccagtgctgggtgtaagagtgccagcctgaaacattgtctgaatggtgaatccagaaaaagtgtgctgtccaaaccgactgactcttcccctgaggttataaattatttaggaaacaaagcatgtgagtgctacatctcaactgccgattgggctgctgtgcaggaatggcagaacgctatccatgacttgaaaaagagtaccagtagcacttccctcaacctgaaagctgacttcaactatataaaatcattaagcagctttgagtctggaaaatttgtcgaatgtaccgagcaattagaattgttaccaggagaaaatatcaatctacttgctggaggatcaaaagaaaaaatagacatgaaaaaactgcttcgtaacatgtgaagtccagatccaagggaacctcagaaatccattgaagttccattgttaagaagttctgtttgtttggcaactgctttaaacccgatagaacaagatcagaagtggcagtctataactgaaaatgtggtaaagtacttgaagcaaacatcccgcatcgctattggacctctgagactttctactttaacagtttcacagtctttgccagttctaagtaccttgcagctgtattgctcgtctgctttggagaccacagtttctaacagactttcaacagaggactgtcttattccactcttcggcgaagctttacgttcatgtaaacagcatgacgtgaggccgtggatgcaggcattaaggtatactgtgtaccagaatcagttgttggagaaaattaaagtatgatctcgtgaaatcttgagagaaactgaatgacgaatgaaactattgttcctgtttcacacagaagaaaactgaggttggcactcatcatgagcccctgttctcattctgcaaatggtgaagctctctattgtcctgaccccacagttcctgtcccatgaccagggccagctcaccaaggagctgcagcagcatgtaaagtcagtgacatgcccatgcgagtacctgaggaaggttatcaatactctggctgaccatcatcatcgtgggactgactttggtggaagtccttggttacatgtcattattgcgtttccgacaagttataaagttgtcattaccctctggatagtttacctttgggtgtctctcctgaagactatcttctggtctcgaaatggacatgatggatccacggatgtacagcagagagcctggaggtccaaccgccgtagacaggaagggctgaggtccatttgtatgcacacaaagaaaagagtttcttcctttcgaggaaataaaattggcctgaaagacgtcattactctacggagacatgtggaaacaaaagttagagctaaaatccgtaagaggaaggtgacaacgaaaatcaaccatcatgacaaaatcaatggaaagaggaagaccgccagaaaacagaaaatgtttcaacgtgcgcaagagttgcggcggcgagcagaggactaccacaaatgcaaaatccccccttctgcaagaaaggctctttgcaactgggtcagaatggcggcagcggagcatcgtcattcttcaggattgccctactggccctacctcacagctgaaactttaaaaaacaggatgggccaccagccacctcctccaactcaacaacattctataactgataactccctgagcctcaagacacctcccgagtgtctgctcactccccttccaccctcagcggatgataatctcaagacacctcccgagtgtgtgctcactccccttccaccctcagcggatgataatctcaagacacctcccgagtgtgtgctcactccccttccaccctcagcggatgataatctcaagacacctcctgagtgtctgctcactccccttccaccctcagcggatgataatctcaagacacctcccgagtgtctgctcactccccttccaccctcagctctaccctcagctccaccctcagcggatgataatctcaagacacgtgccgagtgtctgctccatccccttccaccctcagcggatgataatctcaagacaccttccgagcgtcagctcactccccttccaccctcagctccaccctcagcagatgataatatcaagacacctgccgagcgtctgcgggggccgcttccaccctcagcggatgataatctcaagacaccttccgagcgtcagctcactccccttccaccctcagctccaccctcagcagatgataatatcaagacacctgctgagcgtctgcgggggccgcttccaccctcagcggatgataatctcaagacaccttccgagcgtcagctcactccccttccaccctcagctccaccctcagcagatgataatatcaagacacctgccgagcgtctgcgggggccgcttccaccctcagcggatgataatctcaagacaccttccgagcgtcagctcactgcccttccaccctcagcagatgataatatcaagacacctgccgagcgtctgcgggggccgcttccaccctcagcggatgataatctcaagacaccttccgagcgtcagctcactccccttccaccctcagctccaccctcagcagatgataatatcaagacacctgccttccaccctcagcggatgatctcaagacaccttccgagcgtcagctcactccccttccaccctcagctccaccctcagcagatgataatatcaagatacctgctgagcgtctgcggattccgcttccaccatcagccgatgataatctcaagacaccttccgagcgtcagctcactccccttccaccctcagctccaccctcagcagatgataatatcaagacacctgccgagcgtctgcgggggccgcttccaccctgagcggatgataatctcaagacaccttccgagcgtcagctcactccccttccaccctcagctccaccctcagcagatgataatatcaagacacctgccgagcgtctgcgggggccgcttccaccctcagcagatgataatctcaagacaccttccgagcgtcagctcactccccttccaccctcagctccaccctcagcagatgataatatcaagacacctgccgagcgtctgcgggggccgcttccaccctcagcggatgataatctcaagacaccttccgagcgtcagctcactccccttccaccctcagctccaccctcagcagatgataatatcaagacacctgccgagcgtctgcgggggccgcttccaccctcagcagatgataatctcaagacaccttccgagcgtcagctcactccccttccaccctcagctccaccctcagcagatgataatatcaagacacctgccgagcgtctgcgggggccgcttccaccctcagcggatgataatctcaagacaccttccgagcgtcagctcactccctttccaccctcagctccaccctcagcagatgataatatcaagacacctgccgagcgtctgcggggagcgtctgcgggggccgcttccaccctcagcggatgataatctcaagacaccttccgagcgtcagctcactccccttccaccctcagctccaccctcagcagatgataatatcaagacacctgccgagcgtctgcgggggccgcttccaccctcagcggatgataatctcaagacaccttccgagcgtcagctcactccccttccaccctcagctccaccctcagcagatgataatatcaagacacctgccgagcgtctgcgggggccgcttccaccctcagcggatgataatctcaagacaccttccgagcgtcagctcactccccttccaccctcagctccaccctcagcagatgataatatcaagacacctgccgagcgtctgcgggggccgcttccaccctcagccgatgataatctcaagacacctcccttagctactcaggaggctgaggcagaaaaaccacgcaaacccaagaggcagagggcggctgagatggaaccacctcccgaacccaagaggcggagggtcggtgacgtggaaccgtcacgcaaacccaagaggcggagggccgctgacgtggaaccatcatcacccgaacccaagaggcggagggtcggtgatgtggaaccgtcacgcaaacccaagaggcggagggccgctgacgtggaaccatcatcacccgaacccaagaggcggagggtcggtgacgtggaaccgtcacgcaaacccaagaggcggagggccgctgacgtggaaccatcattacccgaacccaagaggcggaggttgagctgagaagaggccagtgcactcaagcctgagcaataagaataaaaccgagtagaacaaaataaaaaattcaaaaaacaaaacaaaacccacactccaaaaactaacaaagaataaataaataatataaaaat

SEQ ID NO: 7497 - DNA, 3363 bp, Homo sapiens
acgcgtgctcatcttgtgtaaaagtaaaagttgctcatgtcattagctcggctctgagtttgcatgagaaaccagcgcagctctcgagccacgggagaaaacacgatctgctgcggagcccagtgacctgaaactgtagcagtgactcgagacctgtcctctcctcgacgtcgccctataaccctcccgctttatttaggatccgcttttccgagagcagccactcaggcaacccccggaagaagcggcaggagcagcgttggcaccggcgaaccatggctgggattttctatttcgccctattttcgtgtctcttcgggatttgcgacgctgtcacaggttccagggtataccccgcgaatgaagttaccttattggattccagatctgttcagggagaacttgggtggatagcaagccctctggaaggagggtgggaggaagtgagtatcatggatgaaaaaaatacaccaatccgaacctaccaagtgtgcaatgtgatggaacccagccagaataactggctacgaactgattggatcacccgagaaggggctcagagggtgtatattgagattaaattcaccttgagggactgcaatagtcttccgggcgtcatggggacttgcaaggagacgtttaacctgtactactatgaatcagacaacgacaaagagcgtttcatcagagagaaccagtttgtcaaaattgacaccattgctgctgatgagagcttcacccaagtggacattggtgacagaatcatgaagctgaacaccgagatccgggatgtagggccattaagcaaaaaggggttttacctggcttttcaggatgtgggggcctgcatcgccctggtatcagtccgtgtgttctataaaaagtgtccactcacagtccgcaatctggcccagtttcctgacaccatcacaggggctgatacgtcttccctggtggaagttcgaggctcctgtgtcaacaactcagaagagaaagatgtgccaaaaatgtactgtggggcagatggtgaatggctggtacccattggcaactgcctatgcaacgctgggcatgaggagcggagcggagaatgccaagcttgcaaaattggatattacaaggctctctccacggatgccacctgtgccaagtgcccaccccacagctactctgtctgggaaggagccacctcgtgcacctgtgaccgaggctttttcagagctgacaacgatgctgcctctatgccctgcacccgtccaccatctgctcccctgaacttgatttcaaatgtcaacgagacatctgtgaacttggaatggagtagccctcagaatacaggtggccgccaggacatttcctataatgtggtatgcaagaaatgtggagctggtgaccccagcaagtgccgaccctgtggaagtggggtccactacaccccacagcagaatggcttgaagaccaccaaagtctccatcactgacctcctagctcataccaattacacctttgaaatctgggctgtgaatggagtgtccaaatataaccctaacccagaccaatcagtttctgtcactgtgaccaccaaccaagcagcaccatcatccattgctttggtccaggctaaagaagtcacaagatacagtgtggcactggcttggctggaaccagatcggcccaatggggtaatcctggaatatgaagtcaagtattatgagaaggatcagaatgagcgaagctatcgtatagttcggacagctgccaggaacacagatatcaaaggcctgaaccctctcacttcctatgttttccacgtgcgagccaggacagcagctggctatggagacttcagtgagcccttggaggttacaaccaacacagtgccttcccggatcattggagatggggctaactccacagtccttctggtctctgtctcgggcagtgtggtgctggtggtaattctcattgcagcttttgtcatcagccggagacggagtaaatacagtaaagccaaacaagaagcggatgaagagaaacatttgaatcaaggtgtaagaacatatgtggacccctttacgtacgaagatcccaaccaagcagtgcgagagtttgccaaagaaattgacgcatcctgcattaagattgaaaaagttataggagttggtgaatttggtgaggtatgcagtgggcgtctcaaagtgcctggcaagagagagatctgtgtggctatcaagactctgaaagctggttatacagacaaacagaggagagacttcctgagtgaggccagcatcatgggacagtttgaccatccgaacatcattcacttggaaggcgtggtcactaaatgtaaaccagtaatgatcataacagagtacatggagaatggctccttggatgcattcctcaggaaaaatgatggcagatttacagtcattcagctggtgggcatgcttcgtggcattgggtctgggatgaagtatttatctgatatgagctatgtgcatcgtgatctggccgcacggaacatcctggtgaacagcaacttggtctgcaaagtgtctgattttggcatgtcccgagtgcttgaggatgatccggaagcagcttacaccaccaggggtggcaagattcctatccggtggactgcgccagaagcaattgcctatcgtaaattcacatcagcaagtgatgtatggagctatggaatcgttatgtgggaagtgatgtcgtacggggagaggccctattgggatatgtccaatcaagatgtgattaaagccattgaggaaggctatcggttaccccctccaatggactgccccattgcgctccaccagctgatgctagactgctggcagaaggagaggagcgacaggcctaaatttgggcagattgtcaacatgttggacaaactcatccgcaaccccaacagcttgaagaggacagggacggagagctccagacctaacactgccttgttggatccaagctcccctgaattctctgctgtggtatcagtgggcgattggctccaggccattaaaatggaccggtataaggataacttcacagctgctggttataccacactagaggctgtggtgcacgtgaaccaggaggacctggcaagaattggtatcacagccatcacgcaccagaataagattttgagcagtgtccaggcaatgcgaacccaaatgcagcagatgcacggcagaatggttcccgtctgagccagtactgaataaactcaaaactcttgaaattagtttacctcatccatgcactttaattgaagaactgcactttttttacttcgtcttcgccctctgaaattaaagaaatgaaaaaaaaaaacaa

SEQ ID NO: 7498 - DNA, 2483 bp, Homo sapiens
gagctcggtgattggctcagaagggaaaaggcgggtctccgtgacgacttataaaagcccaggggcaagcggtccggataacggctagcctgaggagctgctgcgacagtccactacctttttcgagagtgactcccgttgtcccaaggcttcccagagcgaacctgtgcggctgcaggcaccggcgcgtcgagtttccggcgtccggaaggaccgagctcttctcgcggatccagtgttccgtttccagcccccaatctcagagccgagccgacagagagcagggaaccggcatggccaaagccgcggcgatcggcatcgacctgggcaccacctactcctgcgtgggggtgttccaacacggcaaggtggagatcatcgccaacgaccagggcaaccgcaccacccccagctacgtggccttcacggacaccgagcggctcatcggggatgcggccaagaaccaggtggcgctgaacccgcagaacaccgtgtttgacgcgaagcggctgatcggccgcaagttcggcgacccggtggtgcagtcggacatgaagcactggcctttccaggtgatcaacgacggagacaagcccaaggtgcaggtgagctacaagggggacaccaaggcattctaccccgaggagatctcgtccatggtgctgaccaagatgaaggagatcgccgaggcgtacctgggctacccggtgaccaacgcggtgatcaccgtgccggcctacttcaacgactcgcagcgccaggccaccaaggatgcgggtgtgatcgcggggctcaacgtgctgcggatcatcaacgagcccacggccgccgccatcgcctacggcctggacagaacgggcaagggggagcgcaacgtgctcatctttgacctgggcgggggcaccttcgacgtgtccatcctgacgatcgacgacggcatcttcgaggtgaaggccacggccggggacacccacctgggtggggaggactttgacaacaggctggtgaaccacttcgtggaggagttcaagagaaaacacaagaaggacatcagccagaacaagcgagccgtgaggcggctgcgcaccgcctgcgagagggccaagaggaccctgtcgtccagcacccaggccagcctggagatcgactccctgtttgagggcatcgacttctacacgtccatcaccagggcgaggttcgaggagctgtgctccgacctgttccgaagcaccctggagcccgtggagaaggctctgcgcgacgccaagctggacaaggcccagattcacgacctggtcctggtcgggggctccacccgcatccccaaggtgcagaagctgctgcaggacttcttcaacgggcgcgacctgaacaagagcatcaaccccgacgaggctgtggcctacggggcggcggtgcaggcggccatcctgatgggggacaagtccgagaacgtgcaggacctgctgctgctggacgtggctcccctgtcgctggggctggagacggccggaggcgtgatgactgccctgatcaagcgcaactccaccatccccaccaagcagacgcagatcttcaccacctactccgacaaccaacccggggtgctgatccaggtgtacgagggcgagagggccatgacgaaagacaacaatctgttggggcgcttcgagctgagcggcatccctccggcccccaggggcgtgccccagatcgaggtgaccttcgacatcgatgccaacggcatcctgaacgtcacggccacggacaagagcaccggcaaggccaacaagatcaccatcaccaacgacaagggccgcctgagcaaggaggagatcgagcgcatggtgcaggaggcggagaagtacaaagcggaggacgaggtgcagcgcgagagggtgtcagccaagaacgccctggagtcctacgccttcaacatgaagagcgccgtggaggatgaggggctcaagggcaagatcagcgaggccgacaagaagaaggtgctggacaagtgtcaagaggtcatctcgtggctggacgccaacaccttggccgagaaggacgagtttgagcacaagaggaaggagctggagcaggtgtgtaaccccatcatcagcggactgtaccagggtgccggtggtcccgggcctgggggcttcggggctcagggtcccaagggagggtctgggtcaggccccaccattgaggaggtagattaggggcctttccaagattgctgtttttgttttggagcttcaagactttgcatttcctagtatttctgtttgtcagttctcaatttcctgtgtttgcaatgttgaaattttttggtgaagtactgaacttgctttttttccggtttctacatgcagagatgaatttatactgccatcttacgactatttcttctttttaatacacttaactcaggccattttttaagttggttacttcaaagtaaataaactttaaaattcaagtga

SEQ ID NO: 7499 - DNA, 583 bp, Homo sapiens
gcagctaggcctgcacggctgtggagagatcctgccacgggccttgttcaccatgtcggtgctggatgcgctttgggaggatcgggatgtccgtttcgacctgtccgcgcagcaaatgaaaacaagacctggagaagtccttattgattgtttagattccattgaagacaccaaaggaaataatggagatagagaaattacgaggccaaactgaagctctctatatactaacaaaatgtaacagtactcgttttgaatttatatttacaaatttggttcctggaagccctagactttttacttctgtgatggcagtacacagagcttatgaaacttctaaaatgtatcgtgattttaaattaagaagtgcactaattcagaacaagcaactaagactgttgccacaagaacatgtatatgataaaataaatggagtttggaatttatccagtgatcagggcaatttaggaaccttttttattaccaatgtgagaattgtgtggcatgcaaatatgaatgatagttttaatgtcagtataccatatctgcaaattcgttcaataaagattagagattcaaaatt

SEQ ID NO: 7500 - DNA, 5143 bp, Homo sapiens; identical to SEQ ID NO: 1063

SEQ ID NO: 7501 - DNA, 608 bp, Homo sapiens
agtttgctgtaagtttccttactttgttactgaggcccccagagctccacgcataagtggtgtgaccagaaaccttttaacaagacccgcctgagcctgcgttagagctcccgctcggaaagtggcatggaatattcacatgggagagccgcatgaggccgcccaccacgcttcctgaaggatgcccgtgtggaagaattttgacgtgccagtgtcctcgttctacagggtgttccattcttccgcaatctcagaaaaatgggactaaaagaaactattttgtaaaataagaagacttccatttttaatgaccaacatgtattaagatggacacctactctacgaaacacgaagttctatggtctcgaagaagcccgtgcctgtttaaaactgatcctaactaaaaacagacttgagtggatatgagaatgttggttagtggcagaagagtcaaaaaatggcagttaattattcagttatttgctacttgttttttagcgagcctcatgtttttttgggaaccaatcgataatcacattgtgagccatatgaagtcatattcttacagatacctcataaatagctatgactttgtgaatgataccctg

SEQ ID NO: 7502 - DNA, 1293 bp, Homo sapiens
aaagcagtggtgttttaccactctgcagagaaagctaaggttgctaaccaaacaaaataactttacactgacaatgccaatttttacatttctttcagaacaagggacactcaaactaccagagaaacggaccaatggactgcgaagaactcctaaacaggtggatccaggtttaccaaagatgcaggtcattaggaactattctggaacaccacccccagctctgcatgaaggaccccctttacagctccaggccggggataccgttgaacttctgaaaggagatgcacacagtctgttttggcagggcagaaatttagcatctggagaggttggattttttccaagtgatgcagtcaagccttgcccatgtgtgcccaaaccagtagattattcttgccaaccctggtatgctggagcaatggaaagattgcaagcagagaccgaacttattaatagggtaaatagtacttaccttgtgaggcacaggaccaaagagtcaggagaatatgcaattagcattaagtacaataatgaagcaaagcacatcaagattttaacaagagatggcttttttcacattgcagaaaatagaaaatttaaaagtttaatggaacttgtggagtactacaagcatcattctctcaaggaagggttcagaaccttagatacaactctgcagtttccatacaaggagccagaacattcagctggacagaggggtaatagagcaggcaacagcttgttaagtccaaaagtgctgggcattgccatcgctcggtatgacttctgtgcaagagatatgagagagttgtccttgttgaaaggagatgtggtgaagatttacacaaagatgagtgcaaatggctggtggagaggagaagtaaatggcagggtgggctggtttccatccacatatgtggaagaggatgaataaattcaaatcccgtgttgcaccctgcaccaaaaatttcagagaagggataaatagaagcctgcacagcatcgtgaattaactgaagtgtttaaaaagctgcatttctggctgttcaacatcctccctccttagcccctcctaagtcttaatgctgagatttctaaagatgctggtactgacagattaatggcttgcctagagctgtgcaagaaacagcctgccagtctgtcattgtcagggaccagggcaaaaccaagagctgttcttcccagaagagccctgcaaacacattggttcgtgcttccctttacttcttctggtcagataccatgaatgccagtcatcagtaaatctta

SEQ ID NO: 7503 - DNA, 759 bp, Homo sapiens
accttctcctccagcacaggaactaggaactacggagagagaagccaagggagaggaggaggaggaaactaacgattccctgcccacccccacacccagcaccaccaacaggtgggcaagcttgccgagaaaacgcagagggcatcctgtgagcagcaaacacatctgagcctggaaaagacgcagagaagtaaaagatcaaagcctcggacctagctccggccctcggtctatccggttgcatcctccctccctgttccggatcttatcttgcgccagcgcctactccaggatcccgtagccagacctcaagccatggctggtcccttctcccgtctgctgtccgcccgcccgggactcaggctcctggctttggccggagcggggtctctagccgctgggtttctgctccgaccggaacctgtacgagctgccagtgaacgacggaggctgtatcccccgagcgctgagtacccagacctccgaaagcacaacaactgcatggccagtcacctgaccccagcagtctatgcacggctctgcgacaagaccacacccactggttggacgctagatcagtgtatccagactggcgtggacaaccctggccaccccttcatcaagactgtgggcatggtggctggagatgaggagacctatgaggtatttgctgacctgtttgaccctgtgatccaagagcgacacaatggatatgacccccggacaatgaagcacaccacggatctagatgccagtaaa

SEQ ID NO: 7504 - DNA, 4244 bp, Homo sapiens
ggagacgggatcatgaagcgctcggtagccgtctggctcttggtcgggctcagcctcggtgtcccccagttcggcaaaggtgatatttgtgatcccaatccatgtgaaaatggaggtatctgtttgccaggattggctgatggttccttttcctgtgagtgtccagatggcttcacagaccccaactgttctagtgttgtggaggttggtccctgcactcctaatccatgccataatggaggaacctgtgaaataagtgaagcataccgaggggatacattcataggctatgtttgtaaatgtccccgaggatttaatgggattcactgtcagcacaacataaatgaatgcgaagttgagccttgcaaaaatggtggaatatgtacagatcttgttgctaactattcctgtgagtgcccaggcgaatttatgggaagaaattgtcaatacaaatgctcaggcccactgggaattgaaggtggaattatatcaaaccagcaaatcacagcttcctctactcaccgagctctttttggactccaaaaatggtatccctactatgcacgtcttaataagaaggggcttataaatgcgtggacagctgcagaaaatgacagatggccgtggattcagataaatttgcaaaggaaaatgagagttactggtgtgattacccaaggagccaagaggattggaagcccagagtatataaaatcctacaaaattgcctacagtaatgatggaaagacttgggcaatgtacaaagtgaaaggcaccaatgaagacatggtgtttcgtggaaacattgataacaacactccatatgctaactctttcacaccccccataaaagctcagtatgtaagactctatccccaagtttgtcgaagacattgcactttgcgaatggaacttcttggctgtgaactgtcgggttgttctgagcctctgggtatgaaatcaggacatatacaagactatcagatcactgcctccagcatcttcagaacgctcaacatggacatgttcacttgggaaccaaggaaagctcggctggacaagcaaggcaaagtgaatgcctggacctctggccacaatgaccagtcacaatggttacaggtggatcttcttgttccaaccaaagtgactggcatcattacacaaggagctaaagattttggtcatgtacagtttgttggctcctacaaactggcttacagcaatgatggagaacactggactgtataccaggatgaaaagcaaagaaaagataaggttttccagggaaattttgacaatgacactcacagaaaaaatgtcatcgaccctcccatctatgcacgacacataagaatccttccttggtcctggtacgggaggatcacattgcggtcagagctgctgggctgcacagaggaggaatgaggggaggctacatttcacaaccctcttccctatttccctaaaagtatctccatggaatgaactgtgcaaaatctgtaggaaactgaatggtttttttttttttttcatgaaaaagtgctcaaattatggtaggcaactaacggtgtttttaagggggtctaagcctgccttttcaatgatttaatttgattttattttatccgtcaaatctcttaagtaacaacacattaagtgtgaattacttttctctcattgtttcctgaattattcgcattggtagaaatatattagggaaagaaagtagccttctttttatagcaagagtaaaaaagtctcaaagtcatcaaataagagcaagagttgatagagcttttacaatcaatactcacctaattctgataaaaggaatactgcaatgttagcaataagtttttttcttctgtaatgactctacgttatcctgtttccctgtgcctaccaaacactgtcaatgtttattacaaaattttaaagaagaatatgtaacatgcagtactgatattataattctcattttactttcattatttctaataagagattatgtgacttctttttcttttagttctattctacattcttaatattgtatattacctgaataattcaatttttttctaattgaatttcctattagttgactaaaagaagtgtcatgtttactcatatatgtagaacatgactgcctatcagtagattgatctgtatttaatattcgttaattaaatctgcagttttatttttgaaggaagccataactatttaatttccaaataattgcttcataaagaatcccatactctcagtttgcacaaaagaacaaaaaatatatatgtctctttaaatttaaatcttcatttagatggtaattacatatccttatatttactttaaaaaatcggcttatttgtttattttataaaaaatttagcaaagaaatattaatatagtgctgcatagtttggccaagcatactcatcatttctttgttcagctccacatttcctgtgaaactaacatcttattgagatttgaaactggtggtagtttcccaggaaggcacaggtggagttatttgtgagaagcaaagtgtttactaatgacaaagtagtaaaccattttcaagatgaaaactgatttctatttattttgcttcaaaggtcctgaaaaaataagcaattatcataacaatttgttattgatactggaggtttcattgacatgtctctcaaattaaagctcacactgcctccataaaagtcttcaacatctaatttataagctttacaagtatttattttataaggcttagacagaattattggagttttaaattaagtgtattggaaaagaaaggatggtatgtgtatgaaatgttaagatcctacgcaacactgctatttttttcctttaatatttgtgctgcataacaaaagccactagactgttactgtcttgtctgtccatgtgttaacagcatttcttaatgatgtatatatggagtggtcttcaatcatagtgaagaatttaaagagaaagtcaattgtattggcatttttaataagaacaaaattagttcgtctaaggggactggctggccacatatttgttccttgcccatatgctttctacttcttgttcttattatgaaattatgaatttgaagcctctgaaatggtgatcagttttcaacatctttcaaaaacaaaattactatttcctccatattgccttttttagataactttaaagttaggattttaaaatatttgtaactggctaaattttaaagtcgtgacaaataattacttaggttcagaaatatacacacacttactctttagccagtttctttcaaggtttactgtcccatcagatatctagccattttcctttgcaaattacataccttcttaagagtgtatttttaagattattacttacgctttatgatgatatagtttttcaaaattatttatagcttcatatgatgttttgtaattttttctattgatacctgttttaaaaatattttccaaggaagttgattaaaattatatttgttaccttttagaaaaagcattgaaatgagtttctcttgctttttcattttccctctgctttatatgctcttcgcaatacatcatgtccaacgggatacctattgttctcatgacacccaaaattgatgagagcaaaggggtcgcaccatatggaaatgttgaaaactattgtaaagtagtattatgaagtagcttttgtgtcattcatgtcgatgacatgaaagtgaagtaaatttattctatgtaaattcacactaaaaccagtacagtaccataagtagaatacatgtaagaatcacctagtcttcactatattgagtaaatataacatgctaattttacaattaatgaaactaaacttttaaacatctccattatatctacatccttttgaaggtatttatcatagttgccaattttaattttaggattgactttctctttctgaatgacttcataaagtttggtgtgaattttgaagacttgggttactaatgattgtatctttgctagtcaacaacttatgaaatatactcaatgcgtctgatgtgtcattaagtgcagaaataactaagacacaaataacctttgcaaaccttcaagctgtgtaatattccaatgttgtttttttctttgtatatatacttatatcacgtaggatgtaaaaccagtatgaccttgtctagtctccaaacttaaaataaacttttgaaaagc

SEQ ID NO: 7505 - DNA, 5032 bp, Homo sapiens
accccccaccccctcctccctgcacacaaaagcagcataaattaaccgtcttcgggaagccgagcctctgccagccctgagctgggaagaagcagctacctcggaggcagggcgcgcaggcgggcggcgatgagagggggcgcagccgcagccccgcgctggggagcccaccgctaaccctgcaccccacccacccctgcacaaaagagctggcgggcgctggccacgtcgccctgggtgaccttcctcggatgcagaatccgcccctgcgagcatcctcttcctcctaggctctgaaggcccggggagcgtgagcgatgcccagctgcacccgggcagggctcgcctttgtttgccagtaaggaggagaggctgtctcagctgcagaggggtcatccctgcttcaagccagtgcctcttcccagctcccatggggaccaccgaagccacgctccggatggaaaacgtggacgtgaaggaggaatggcaggacgaagatcttcccaggccactcccagaagagacgggggtggaactgcttggcagcccggtggaagacacatcctctcctcccaacacgctaaatttcaacggagcgcatcgtaagaggaagacgctggtggccccagagatcaacatttctctggatcagagtgaggggtccctgctgtccgatgacttcttggatacccctgatgacctggatattaacgtggatgacatcgagacccccgatgagaccgactcgctggagttcctggggaatggcaacgaactggagtgggaagacgacacccccgtggccaccgccaagaacatgcccggggacagcgcggatctatttggggacggcacgacggaggacggcagcgccgccaacgggcgcctgtggcggacagtgatcatcggggagcaagagcaccgtatagacctgcacatgatccggccttacatgaaagtggtcacccacggagggtactacggcgaaggcctcaacgccatcatcgtcttcgcagcctgcttccttccagacagcagcctccccgactaccactacatcatggagaacctcttcctgtacgtcatcagcagcttagagctcctggtggctgaggactacatgatcgtgtacctgaacggtgccacgccccggcggaggatgcctggaatcggctggctgaagaagtgctaccagatgatcgaccggaggttgcggaaaaacctgaagtccttgatcatcgtccacccctcgtggttcattcggactgtgctggccatctctcgccctttcatcagcgtcaagttcatcaacaagatccagtacgtgcacagcttggaagacctggagcaactcatccctatggaacacgtccagatcccagactgcgtcctgcaatacgaagaggaaagactgaaggccaggagggagagcgcgaggccccagccggagtttgtgctgcccaggtctgaagagaagccagaggtggcaccagtggaaaacaggtctgctctggtctcagaagatcaggaaacaagcatgtcctgaggcgacgtgagcataacaaaggacatggaagaagattccagatgccagaaaacctctgtcagacgcccactggccccagatctcatcctgcctcatcctgagtcccaatcttccaagggtgccagcccctccgttcatctctgaaacccagcatccttttcagctgcttgaaaacattgtattttttttttttaacgatgcagtatttgtgcgttccagaaaagggcccagctctgagcccctcacccttccacactcacgaactctcagccgaggaaggcaagaagcgcagggggtggcccgcgtggcgtcggtggcctccgctcctgctcgcagcctctgtggtcagagctggatacaagattcaagacccttctcttgcttgtcacccgctccaggttggagccacagacacccaccgccaccccggctgggtctgcgtcctttcctgtgcctttccctccagaatgcggcctcagacctagaagctcaacccccctatgagggccacgtcctggggtagctcctgacctccgaccttatgtccaaatttcacacccatggtttttcatttgacccgcccccttctcgctcataatgacacccagctcctttgagaggatcagagcccattgcacaagaagagccgctgccaaccatccttgtcctccgattgcaaaatgacaccccagtaatctagaacattctcaagcccctttaactcagatgtcaagccaccgggcaaaccccgtcaatacctcccaccaaggaatgagatatgtggacctcactgctcccccaacccagcgtcaggctgggacacgccaacgctgttccgggttggaacagcagaggctcagaaactggctctgaaataggcagacctagcaagaggaagatacagggtatcgggcgtttgagtgtttcagaagtcattcgggaagataaatccagtgcgctggccgcagccacctgcattcaaagcttggaccagcgggttcttgttcgggaggcaaatttccctaggaaaaagaagacagacttttctaatgtggtccaaatgcggatcactggtcagatggactctagaagcactgagctccctgtctctggaagtatttaagaaaaggctgggccaggcacgatggctcacgcctgtaatcccagactttgggaggccgaggcaggcggatcacctgaggtgaggagtttgagaacagcctggccaacatggtgaaacctcatctctactaaaaatacaaaaattagccaggcgtggtggcaggtgcctgtaatcccagctacttgggaggctgaggcatgagaatcacttaaacctgagaggcagaggttacagtgagccaagatcgtgccactgcattccagcctgggcgacagagcaagactctgtctcaaaaaaaataaaaaataatcagggcacagtggctcatgcctgtaatcccagcactctgggaggctgaggtgggtggatcacctgaggtcaggagttcaagaccagcctggtgaacatggcgaaaccccgtctctaataaaaatacaaaaattagccgggcatggtggtgcatgcctgtaatcccagctactcgggaggctgaggcaggagaactgcttgaacccaggaggcagaggttgcagtgatccaagatcatgccactgcactccagcctgggcaacaagagcaaaactccgtctcaaaataaaaagaaaagaaaagaatggacagtgtttgcagagagttgctcacgagtttccctctaatcctaaatgtcttcatgtctatcagtctgagcagacggtgagtagggcgggcacattctccaggcccttcttcctagctctgtggttgacctctcagcaagtgctatccaggctgggccaaccagacccacaattaactgagcctcagtgaaagcgtccagtgcatcttgacctgagacagcaaggaattgcatttggggttattccaacgatgatggcagggaactggtggtatttagtgctgaggggcagtgatacagaaagatttgccctgtgggacagggtcctgcgcgagtcccatccccaaaagccagcagctcctgccatgaggaagacggggtttctgagcaggcttatgcctgcaggttcctgtggagccaccggctgtgacgggacacctctgggtctcagcattgccctggggaggctgggacatttagggacatggtagggttttaacatttgtttcccaaatgtcaaatcccgggcacaggggcaagaccctgtcccgaattcccaccccagtgaatggtgtcgctgccaaagccaacacaagatgacaaaagtggctgggtacggtggctcacgcctataatcccagcactttgggagaccgagacaggtggatcacctgaggtcaggagttcgagaccaggctggccaacatggtgaaaccccatctctactaaaaatacaaaaattagctgggtgtggtggcgcgcacctgtagtcccagctactcaggaggctgaggtagaagaatagctggaacccaggaggcagagattgcagtcagccgagattgcaccactgcactccagcctgggagacagagcaagactgactcaaaagaaaaaaaatgacagaagcctgattatcagactgcccggaggagacaggctccagcagatagatgccagccaggcccagctgccacgatttgtcccaggtgaccaaaggcacgcagctccagcatgaatcgttctaacccaacagtgacaagaactgctgggccttaaccgtcatggaagactggggccgcttccaagtcacagacaggagacggggacaggaaagaactcattccacccaatcggacacctaataattgagtgtctacagcagcaatcaagtgacaagtgaggccctacctgacccagaaggtgcctgccggctaaacattctgcccccaccagaaactccagggggtccgcccgttatgccgtggcccacccacgcccctttggatcaccagcagtcacagacaacaggcaggcgaaactgaagaccccaactcagccccagcggaccctccagagcaaaagaggcccccggcgaggccacctgtcggcaggcatgccgaggtcaaacagccggggccaccgttcccagctgggccacgacctgcaccgtccacagatgggctttgagatggatttgtatcagggtggggggtgtggtttggccaaaatgcaatggaccccgacccctcctcgtaaaaggatgttgggtttccctctggtgacacatgggatgcgtcataaaccctcccccaaagtcctggtcagcagcccatccttccaacgatgagttttgcggtttttcagaacagaaatgatcactacgattgacgacggtcgtgatgttaagacgtcgtctccatgagctttggggggacttttatgtggaataaagaaactatcactg

SEQ ID NO: 7506 - DNA, 2085 bp, Homo sapiens; identical to SEQ ID NO: 4988

SEQ ID NO: 7507 - DNA, 631 bp, Homo sapiens
tcaaactcttcaggatgcagaaaggcagtgaactcctccggagtagctgtcaggtcaccattgaggtctgcagctttgaatcttctctcatcacgtggcagcatctttttaaaggttttcagctcctcagtagtgacaaagccatacccatcattgtcgattcgatcaacaatcttccctagcctctccttgctctcgtccggggtgagctcgtcgaagttcttggagtcctccttgcccaggaaggcctcgtggtcgtactggaagctctggttgtcctcagggggccgctcgcccagctccgagtcgggccgcaccacgcgctctttgcgcaccgtgggcttggcccgcagaacccgcggcgccagcaccagcgccagcagcagccccagggctaaccccaggcggccaccgcgcgccatcgtcccgaggagagggcggccgggagggagacgctgagcgagcgacaacagcggcagctcgggaatgggggctcggagcgcggcggccaagttttatgttatgtatattttacaagtaaaaaaattttttcacctcagcctgaactgaacactagctgacagacgttttgatttctttgaccatcacggaatcgtggccaagcgcggtg

SEQ ID NO: 7508 - DNA, 819 bp, Homo sapiens
atctgcctggggccagtgaggagaatgcatctagacagagcttttcgtgctgctgagatctgttacctaaagcaataaaaaatggccagaggatcagtgtccgatgaggaaatgatggagctcagagaagcttttgccaaagttgatactgatggcaatggatacatcagcttcaatgagttgaatgacttgttcaaggctgcttgcttgcctttgcctgggtatagagtacgagaaattacagaaaacctgatggctacaggtgatctggaccaagatggaaggatcagctttgatgagtttatcaagattttccatggcctaaaaagcacagatgttgccaagacctttagaaaagcaatcaataagaaggaagggatttgtgcaatcggtggtacttcagagcagtctagcgttggcacccaacactcctattcagaggaagaaaagtatgcctttgtcaactggataaacaaagccctggaaaatgatcctgattgtcggcatgtcatcccaatgaacccaaacacgaatgatctctttaatgctgttggagatggcattgtcctttgtaaaatgatcaacctgtcagtgccagacacaattgatgaaagaacaatcaacaaaaagaagctaacccctttcaccattcaggaaaatctgaacttggctctgaactctgcctcagccatcgggtgccatgtggtcaacataggggctgaggacctgaaggaggggaagccttatctggtcctgggacttctgtggcaagtcatcaagattgggttgtttgctgacattgaactcagcagaaatgaa

SEQ ID NO: 7509 - DNA, 2814 bp, Homo sapiens
ggaaccgagttcccaggccggacgcgcggtggcctgacggtcgcaaggattacattcgcctgacccggcccggcttgaccctgcccgggcgcgccatgttcgcgcgtgggtcccggaggcgccgctccgggcgtgcgcctccagaggcagaggacccagaccggggccagccctgcaactcctgtagggagcagtgccctggcttcctgctccacggctggagaaagatctgccagcattgcaaatgcccgcgggaggagcatgcagtgcacgcggtgcctgtggacctggaacgcatcatgtgtcggctaatctcggacttccagcgccactccatctccgacgacgactcaggctgtgcatcggaggagtatgcctgggtgcccccaggccttaagccggagcaggtatatcaatttttcagctgcctcccagaggacaaggtcccctacgtcaacagtcctggggagaaatacaggatcaagcagctgctgcaccagctgcccccacacgacagtgaggcacagtactgcacagcactggaagaggaggaaaagaaagagctccgagcctttagccagcagcggaagcgggagaatctggggcgtggcatcgtgcgcatcttcccggtgaccatcactggggccatctgtgaggagtgcggaaagcagattggaggtggggacatcgcagtgtttgccagccgtgcaggcctgggtgcctgctggcacccacagtgcttcgtgtgtaccacgtgccaggaactgctggttgacctcatctacttctaccatgttggcaaggtctactgcgggcgtcaccatgccgaatgcctgcgtccacgctgccaagcctgtgacgagatcatcttctcccctgagtgcacggaggctgagggccgccactggcacatggatcacttctgctgctttgagtgtgaagcttcactaggagggcagcgctatgtcatgcgtcagagccgcccccactgctgcgcctgctacgaggcccgccacgcggagtactgtgatggctgtggggagcacatcggcctggaccaaggccagatggcttacgagggccagcactggcatgcctcagaccgctgcttctgctgtagtcgctgtgggcgggccctgctgggccgcccattcctgccacgccgaggcctaatcttctgctctcgagcctgcagccttgggtccgagcccacagctccagggccgagccgccgcagctggagtgccggccctgtcacagccccacttgcagcctccacagcctctttctctgctgtgaagggggcatcagagaccaccaccaaaggcaccagcacagagttagcgccagctacaggccctgaggagccctcccgctttctgagaggggctccccaccgccactccatgccggaactggggctccgcagtgtccccgagccgcccccagagtcccccggccagcctaacctgcgcccagatgatagtgccttcggtcgtcagagcaccccacgcgtcagcttccgcgaccctctggtgtctgaaggaggcccgcgccggaccctgagtgcacccccggcccagcgccgcaggccacgcagtcccccacccagggcccccagccgtcgccgccaccatcatcataatcaccatcaccatcacaaccgccacccaagcagacgtcgccactatcaatgtgacgcgggatcagggtcagactcggaatcttgctccagctcgccctccagttccagttccgaatcatcagaggatgatggcttcttcctaggagagcgcatccctctgcccccgcatttgtgcaggcccatgcctgctcaggacactgcaatggagaccttcaactccccatctttatcgctccccagggactctcgcgcagggatgcctcgtcaggcccgagacaagaactgcatcgtggcttgaaggcaggccgtcctggagggggctccattctccagtcagagtagatgatgaggcccatgcccctcacccccacgccccgcccctacaacctaagtcataaatcctcttcctccctcctttatcagtttgtttctatttttgtttctgttttagagacttggtctaccctattgcccaggctggagtgcagtggtgtgatcagggctcactgcagcctcaaaagttttgggctcaagctatcctcccacctcagcctcccaagtagctgggactccaggctcgtgtcagcgttcccagctaattttttaattttttggtagagatggggttttgccatgttgcccaggctggtctagaactcctgggctcaagcaatcctcccgcagcctcccaaaggactgggattacaggcatgagccaccgcaccgggcctctcgtttgtattattgaagtaatttaatatttgttgtaaaacaggcctggcttctttgcctccttgccccagctgtttccactccatttccccctcctgatgcttgaaatttacccacatttgatgaaaggattactttattcattatcgtatattttaacaatgtttattattcatttatccctctatagaaccaccacccacaccgaggagattatttggagtgggtcccaacctagggcctggactctgaaatctaactccccacttccctcattttgtgacttaggtgggggcatggttcagtcagaactggtgtctcctattggatcgtgcagaaggaggacctaggcacacacatatggtggccacacccaggagggttgattggcaggctggaagacaaaagtctcccaataaaggcacttttacctcaaa

SEQ ID NO: 7510 - DNA, 3066 bp, Homo sapiens
aactgcagccccctctcgcgccgcctgcgaagacaaggtcagtggccgcgaagttggaacgtgatcggagccacgaggcccagtgaggcggcaccgagggggcagcgcaacgcgctccccctgtccagggcgtcaagtgcgcccctcccggggcccgcctgtgctccgggcggagcgcgctagctgctcgggcgcggggcgttcttggtgcgccgggccgtggtgagtccgggctcccgtggccgcgtgctgggaggagactggagcccggttaggaagaatggagttggcgactcgctaccagatccctaaagaagtggctgacatctttaacgcccccagtgatgatgaagagtttgttggcttccgagatgatgttcccatggaaaccctctcgtcagaggagagctgcgatagttttgactcactagagtcagggaaacagcaggatgtgcgctttcattccaaatacttcacagaagagctaagaagaatttttatagaggacactgactcagagactgaggattttgcaggatttacgcagagtgatctgaatggaaagactaacccagaagtaatggtcgtggagtcagatttgagtgatgatggcaaagcatctttggtgagcgaggaagaggaagatgaagaagaagataaggctacccctagaagaagcaggtctagaagaagtagtattggtcttcgagtagcctttcagttccccaccaagaagctggccaacaaaccagataaaaacagttcttccgagcagttgttttctagcgcacgcttacagaatgagaaaaaaacaattcttgaaagaaagaaagactgtagacaggtgatacaaagggaagattctacctctgagtctgaggatgactctcgggatgagagccaggagagttcagatgctttgctgaaaaggaccatgaacatcaaggagaacaaagccatgcttgcccagttattggcggaattgaactcgatgccagatttcttcccagtacgaaccccaacctcagcttctaggaagaagacagtgaggcgggccttctcggagggacagatcacgcggcgtatgaacccaacccggagtgcgcggcctcctgagaagtttgctctagagaacttcactgtctcagccgctaaatttgcggaagagttttacagcttccgaagaaggaagacaattggggggaaatgccgggagtacagacgacgtcaccgtatatcttcttttcggccagtggaggatatcaccgaagaggacttagaaaatgttgccataactgttcgagataaaatctatgataaagttctgggtaacacgtgccatcagtgtcgacaaaagaccatcgacaccaagacagtgtgtcggaaccagggttgctgtggtgtgcgaggacagttctgtggaccatgcctgcggaaccgctatggggaggatgtcagatcggcattgctggacccggattgggtgtgtcccccctgtcgtgggatctgcaattgcagctactgtcggaagcgtgacggccgctgtgccacaggaatcctcattcatctggccaagttttatggttatgacaatgttaaggaatatctggagagcttacaaaaggagctggtagaagacaattaagaggaaaacaaacagaaccagccacctcaccatagagtactccaacaagacatgcataccattggtgcctaagaaagatttttttacagttgtgtttttatacagaaattctttgtagaaattactattttttgttaaagattgtttatatgcttacaaagatttctcaggaagacagcagagcagaggaatctatatagatgtatgcacagacctgtctgtatgctgaactttgttaaaaatatctgccagttattaaaaagcacagtttaaatggggtggggttaaagttcaggtaagtaagttagagagaaaacattgtatgatcagctcctgcacttgatctatctatctttggcttcccaaacagtaactcactccaggccaagtgtgccttagcacgagtgaccacagtttaatagaccacacacatcgtttaacctgctcttggtcattggaaatttacactgaacaaagtgcaattaactgtagaacagttttatttttattaaaacttgactgaacaaaaggggaccatcaacattgtagacactggacactggaggccttacagagtgctagcctcttccttcaggactcacctggggcctgctgcttttatattttgaaagagtttaagggctaataatttaatttgttgtttgttaaaaattaaaatctccgttctttccggctgcattgcttttgcatgttcacatatgatgtacttttatgatgtacttttttttttttgagatggagtcttgttctgttgcccaggagggagtgcagtggtgcaacctcggctcactgcaacctttgcctcctaggttcaagtgattctcctacctcctgagtaactgggattacagtcgtgtgccaccacgctcagccctgagttagtttctagtatttttttctgactttcactctaaggatagcgttgaaaaaagaatgcacgtgtgagttactaaaaagttagaataatgtgcatgggaacagtgcagcaacatgctagaaaatcctcactgcactccagcagaggctagaggaatgccagtgttaccttacgcttctagaagcagagccactccagccagaacccattttgcagtcttctcttcgctcttcagcctgaaggtccagatgtagctggggcctctcagtttggttctatacacagggcactcgtaggtctgtttggtttcttgtctgtccacgggggtggcttttgcaaagatgaccggcatagggcatgccagctccttgagacgggcttcaacaatggttcctgcttgggtgtcccagcgggcgcctatggcaaaaacacagcggttgcaattgtgtggcagcttgctactaatgataatgatcaagtaagttgtttgatgcaataaacattcaacattctggttttgtca

SEQ ID NO: 7511 - DNA, 1443 bp, Homo sapiens
cccgacggacaccaccaggcccacggagcccaccatgccgcgcccggcccccgcgcgccgcctcccgggactcctcctgctgctctggccgctgctgctgctgccctccgccgcccccgaccccgtggcccgcccgggcttccggaggctggagacccgaggtcccgggggcagccctggacgccgcccctctcctgcggctcccgacggcgcgcccgcttccgggaccagcgagcctggccgcgcccgcggtgcaggtgtttgcaagagcagacccttggacctggtgtttatcattgatagttctcgtagcgtacggcccctggaattcaccaaagtgaaaacttttgtctcccggataatcgacactctggacattgggccagccgacacgcgggtggcagtggtgaactatgctagcactgtgaagatcgagttccaactccaggcctacacagataagcagtccctgaagcaggccgtgggtcgaatcacacccttgtcaacaggcaccatgtcaggcctagccatccagacagcaatggacgaagccttcacagtggaggcaggggctcgagagccctcttctaacatccctaaggtggccatcattgttacagatgggaggccccaggaccaggtgaatgaggtggcggctcgggcccaagcatctggtattgagctctatgctgtgggcgtggaccgggcagacatggcgtccctcaagatgatggccagtgagcccctagaggagcatgttttctacgtggagacctatggggtcattgagaaactttcctctagattccaggaaaccttctgtgctcttgataggtgtgctcttaacacccacggatgtgagcacatctgtgtgaatgacagaagtggctcttatcattgtgagtgctatgaaggttataccttgaatgaagacaggaaaacttgttcagctcaagataaatgtgctttgggtacccatgggtgtcagcacatttgtgtgaatgacagaacagggtcccatcattgtgaatgctatgagggctacactctgaatgcagataaaaaaacatgttcagtccgtgacaagtgtgccctaggctctcatggttgccagcacatttgtgtgagtgatggggccgcatcctaccactgtgattgctatcctggctacaccttaaatgaggacaagaaaacatgttcagccactgaggaagcacgaagacttgtttccactgaagatgcttgtggatgtgaagctacactggcattccaggacaaggtcagctcgtatcttcaaagactgaacactaaacttgatgacattttggagaagttgaaaataaatgaatatggacaaatacatcgttaaattgctccaatttctcacctgaaaatgtggacagcttggtgtacttaatactcatgcattcttttgcacacctg

SEQ ID NO: 7512 - DNA, 918 bp, Homo sapiens
tcagactaataaaaagaaattagaaaccaagtacttttttttttttacttaaatattttgccgtgggtggatgttaaagaaggccgtggtaatttacaggatgggttccaagttctcttcttctggggctttaaggcagatttccagcagacctctttccggtcacaagttcagtcacaagacagagaccccagagttagcgttgtctacctgggacatctcccagccccccttcaccctcacaaattctgcagtgtgtttttaatgatgtgtctttgggtgatgagtatgctctgggactaggtggaggtggtggttgcatctcccatgtagctcatggtcaatacaggtggtgattgtacaatattgtgaatatatgaaacaccattgaaggaggggggaaggaaagaaagaaaaataggagaagaaaggaagaaagaaagctgggggtctagtgaaaaccattttacagaagtaaagtaggcaaaaagttaaaaggataaatggttgcaggaaagtaaacagttccaggtgcaggggctttaagactattacattagatattgctggattttgacattttaaggttaagtgttcctgctaaaaaggaatgatgtaaatagcttgtaacctagttggggtgatagttactcaggcatatgcatttgccaaagttcatgcatctataaataaaagatctgtgcacaatatctcatgaagatttttactcttgacattattacatagtccaatatgaaataaaatattaattaaatttcttgaaatactagaactctgataactaccttttgtttctacaccttgtagaaacaaatctttgtggaacagatttggaacaaatatggaaaattaatgtatttcacatcagtaaaatcgtgacattgggaaaaacattac

SEQ ID NO: 7513 - DNA, 2691 bp, Homo sapiens
gactcagagcgctccgggctgcaggagaggaaggtaggggaccaagctaccggtgcagggcctggatccaacccctgctctggaagactgagagctccacattctagctccctttccccagtccccaaatttgtaggggctccttgaattgcacgccccatgggtggaggatttcatcctgatgtatgatccccaggaaggttcctgcaagtttggcagtttaggggaatcttttggaggttgaaggagggatttagccatctcctaatctcaaggcccttcttcctactttccttctcttttactttactttttttcccgctttctttctttgatatagacaattgatgttttctcagtttcaggatagtgtaagctgaggaaatgaggctgtaagcctcatctactccaatcagttgcagcccctaagcccttctctatagaaatgtaagagaccgacgcagtctcttctgtaaatacgtggacattggaaatctaggactgaatggaaaggttaaatcaatctctgattttatccaagccccacttcttaccccaaatctcctccttgtctggttccgagttctccacttcacccctgccacaggccgcaggggtgtgtgtggccggtggtgccacccagctcccctcccaccctcctagctgctgagcggctggtgctgggactctgcattcctgaagcagctacctggctaggccggaagccttgtattctcccagctgcctcagattcatggctttcagcttggtggccagtctctacctaagccttgcaagttgcctttctgaagtgccatcctgagagacagaactaattctgacccaaactaattttgtttgtactgggaagagtgggggcaagggtgcagaatagcaagttttcctcaacggaggatttgttctgagcttagaatcaggaagcgaaggctatttccttgtaggggtgccctttgcgtctctctctcttttactctagccaccttggtgagtattgcccagcctgagagcttctctttcagctgttttactcctgtgtgagtctcctgctttaggctctctgcttaatgtgttattagaaattcttccctcccccagcccagcctgttctaccagagaacttgcccaggtcagaggtctgcgtagaagcccttttctgagcatcctctcctctcctcacacctgccactgtcctctgcgttgctgtcgaattgttccaacttcctaactccaacattaaccctttgaatgtattcttatgccagagaaaggcacataaagtactggtgtttgaacagataacttccaacatgtcctctgtttgtgatatgtcttttctgcagaaatcttgcatcaccatggtgcacttctgtggcctactcaccctccaccgggagccagtgccgctgaagagtatctctgtgagcgtgaacatttacgagtttgtggctggtgtgtctgcaactttgaactacgagaatgaggagaaagttcctttggaggccttctttgtgttccccatggatgaagactctgctgtttacagctttgaggccttggtggatgggaagaaaattgtagcagaattacaagacaagatgaaggcccgcaccaactatgagaaagccatctcccagggccaccaggccttcttattggagggggacagcagctccagggatgtcttctcttgcaatgtgggtaacctccaacctgggtcgaaggcggcagtcaccctgaagtatgtgcaggagctgcctctggaagcagatggggctctgcgctttgtgctcccagctgtcctgaatcctagataccagttctctgggtcgtctaaggacagttgccttaatgtgaagactcctatagtccctgtggaggacctgccctacacactcagcatggtcgccaccatagattcccagcatggcattgagaaggtccaatccaactgccccttgagtcctaccgagtacctaggagaggacaagacttctgctcaggtttccctggctgctggacacaagtttgatcgggacgtggaactcctgatttactacaatgaggtgcatacccccagcgtggttttggagatggggatgcctaacatgaagccaggtcatttgatgggagatccatctgcaatggtgagtttctatccaaatatcccagaagatcaaccatcaaatacctgtggagagtttatctttctcatggaccgctcgggaagtatgcagagccccatgagtagccaggatacatctcagctgcgaatacaggcagccaaggaaacactgattttgctgctgaagagtttacctataggctgttatttcaacatctatggatttggctcttcctatgaggcatgctttccggagagtgtgaagtacactcagcaaacaatggaggaggctctggggagagtgaagcttatgcaggccgacctagggggcactgaaatcttggcaccactccagaacatttacaggggaccctccatcccaggccaccccctacagctttttgtctttacagatggagaagttacagacacgtttagtgtaattaaagaagttaggatcaacagacagaaacacaggtaggaagaaaatgtgatttccgggtgattggtgctgagtagtgacacacagactctagtgctacatgatg

SEQ ID NO: 7514 - DNA, 2336 bp, Homo sapiens
cgcggccggcatttctcctcgcagctcgctgcctcctctatccctgcctccctctcccccctctgtttttctcccttccttccctctccgaccctcttcctctccctcccgatcctttccctcctcctctcatctttcccctgtctctccgttctagctcgtcccccaccccaccttttcttctttctcctcctctccttcctctccccctctcctctgtctccttccaccgtctcccctgcctccctgtctttcagtccctgtttttcagccccgtctccctctcggtttctctcccccaccctccctccgggtttcctccccggtgccctccctcctctctccctcccctccccctccgcccctcgcagccccgccgctcgcagctcccagtctgcctccccgaaccggcgccgccgcccgcactcgccgcaggaccggcccgcccggctcccggggtgcgccctcctcggtcccgcgccctccgggctcgcagggacgtctcctccctcccggctcgcggccccgcccggcccggcccccgcccagagccccagcgcgccgaggatgtgagtcctgctcgcctctggcggagcagcagccactcgcgcgcggagccggagcgcagcgcagcgcagccgcgggcgctctccgggccgctcgcgcgagtgccgcgctcttgccctagcggcgtcccccggcctctcgccggcgccaccgccgcagcagcccgcgggccgtccccggccggccgcccccggccccagcgccgctgaccctgtccgccgcgggcggggacgcgggcggaggaggcgccgcggcggagcccccggacgcgaccatgtcggaggtgctgccctacggcgacgagaagctgagcccctacggcgacggcggcgacgtgggccagatcttctcctgccgcctgcaggacaccaacaacttcttcggcgccgggcagaacaagcggccgcccaagctgggccagatcggccggagcaagcgggttgttattgaagatgataggattgatgacgtgctgaaaaatatgaccgacaaggcacctcctggtgtctaactcccccaaagacaatgagttaagggagagaataagaacggcggtaacagttattggcaaaaagcatgaaaagagaaagcactttgaaatttattactagcttgctacccacgatgaaatcaacaacctgtatctggtatcaggccgggagacagatgaggcgagaggaggaggaggaggaggagaaggctctgggctcctctgcaaaaataaaaataaaaaaataaataaaattttaaaaataataaaaattcactatatacacatataaagaaataaaaagaagtctcagttgcagctatttgtcaaaattaatatccatttctttttatatacggtgaatattgcgcaattatagatctggattttgaaccacttaatgaagcggcaacaccaggtgttttgaggtgttggcattcttcgctgatttggctgttcccaatgtttacattatttaatcttgcaaaaatggttctgtgcacttggatgtgaaatgctgtccagttttattttttttatgttgttatccttggatgtacaaaaaattcagaaaatgatctctgtagatattctgttttattttggtcatctttagaagttatcaggaatgtgtttaaaacaagaagagaacttttctaaggaatgatacatagaaaagattttattttaaaatgagttgtaaagcttgtgtttctttgttgctgcaagctatctgcccaagttaatgcaaatggacacattttttatgtcagaaaaacacacacacacacacacacacacacacacacacacgaaaaacaaagaaaaaaatgcttgagctttttctaacttccccttgcagtctgttgtgtgagcagcctgtttatttctctaatattatgtcagtttattctctttaatggactgtaaaaaaatgtaatcacaagagtgccaaatatcttgaaatgccaaaaggcattttagtttcttttctctgtgctctgagtccacgtacaggaatgcttggagtgtcttttctgttatttatagggattctcttaaggcacaccagctgcctgttttgcatggtatttgcaaaaatgcctcttgcgtgaggaaatcttttaccattttttgtttgcaactttggacctcaagaggtttcccttcccttccccgttccctcttttcttaattcaatattctgtatgttgcaccttgaaccagcacacagggctatttctccaatgtacaataaaagaattgttcctgtgtctca

SEQ ID NO: 7515 - DNA, 1618 bp, Homo sapiens
cggacagcgaggccaagatttcagctgcgggacggtcaggggagacctccaggcgcagggaaggacgtgaggaggggaagcgggctggggcggcagccgggcggaggggcagctgcgcaggcggaatgaggaacgcctttgctctaaggcgaccaccctggcagctcttcactgaggggcctcggtttccacatctgtcgctctccggtcccaagaccaccaggaccgacggggctctccgggagggtcagcccctccggtggccccagtcatgcatcaggggacggatcagaagggctaggaagaggggtcgtggggaaggccccagaaaaaagaggaaggagggaagattttgcctgaagcgggaaagccaagggctgggcggcgcgagacccccattcctagcgactggggctggctggtggcccgcggcagcccccgcgccgggaggattaggcctcccgccgctcccacccgtccggaccctcccacgtgtttaggtcctcccaaaagtattcggcctccggcccctgccccttcccccggctggcctggacctcggggacgtggggggaaccccgtgggagcagggggattctggacggggagggagtagcggttggggagaaggctgagcggggaaaggagagaggggctccggggacggcagggaggagagtgggtcgtgccggagacccagggagagacacaatgggcaagattaggggtgtagggtgggagtgcgaactgactgattcctagcgtgggcagggaactttgctaaaactgcaggccccagggaacagcgcgggcagggtgggagggaacggagagggccaggcggaccctaaggtcaatttggagaaagggccatttccaggctccttcacctgtgcccagcgttctacaggcctggaccccgcccccgctccccaccctccccccagagcagggcgcgggaggaggcggctcgggctggctcggagagctgaggggcgcacacccgcttcgcagggccagggtgacacggaagcatgcgacggctgctgatccctctggccctgtggctgggtgcggtgggcgtgggcgtcgccgagctcacggaagcccagcgccggggcctgcaggtggccctggaggaatttcacaagcacccgcccgtgcagtgggccttccaggagaccagtgtggagagcgccgtggacacgcccttcccagctggaatatttgtgaggctggaatttaagctgcagcagacaagctgccggaagagggactggaagaaacccgagtgcaaagtcaggcccaatgggaggaaacggaaatgcctggcctgcatcaaactgggctctgaggacaaagttctgggccggttggtccactgccccatagagacccaagttctgcgggaggctgaggagcaccaggagacccagtgcctcagggtgcagcgggctggtgaggacccccacagcttctacttccctggacagttcgccttctccaaggccctgccccgcagctaagccagcactgagatgcgtggtgcctccaggaccgctgcgggtggtaaccagtggaagaccccagcccccagggagaggaacccgttctatcc

SEQ ID NO: 7516 - DNA, 4901 bp, Homo sapiens
atggggaaagatggaaggagtaataaaagactagtggccttagtgcccatgcccagtgaccctccattcaatacccgaagagcctacaccagtgaggatgaagcctggaagtcatacttggagaatcccctgacagcagccaccaaggccatgatgagcattaatggtgatgaggacagtgctgctgccctcggcctgctctatgactactacaaggttcctcgagacaagaggctgctgtctgtaagcaaagcaagtgacagccaagaagaccaggagaaaagaaactgccttggcaccagtgaagcccagagtaatttgagtggaggagaaaaccgagtgcaagtcctaaagactgttccagtgaacctttccctaaatcaagatcacctggagaattccaagcgggaacagtacagcatcagcttccccgagagctctgccatcatcccggtgtcgggaatcacggtggtgaaagctgaagatttcacaccagttttcatggccccacctgtgcactatccccggggagatggggaagagcaacgagtggttatctttgaacagactcagtatgacgtgccctcgctggccacccacagcgcctatctcaaagacgaccagcgcagcactccggacagcacatacagcgagagcttcaaggacgcagccacagagaaatttcggagtgcttcagttggggctgaggagtacatgtatgatcagacatcaagtggcacatttcagtacaccctggaagccaccaaatctctccgtcagaagcagggggagggccccatgacctacctcaacaaaggacagttctatgccataacactcagcgagaccggagacaacaaatgcttccgacaccccatcagcaaagtcaggagtgtggtgatggtggtcttcagtgaagacaaaaacagagatgaacagctcaaatactggaaatactggcactctcggcagcatacggcgaagcagagggtccttgacattgccgattacaaggagagctttaatacgattggaaacattgaagagattgcatataatgctgtttcctttacctgggacgtgaatgaagaggcgaagattttcatcaccgtgaattgcttgagcacagatttctcctcccaaaaaggggtgaaaggacttcctttgatgattcagattgacacatacagttataacaatcgtagcaataaacccattcatagagcttattgccagatcaaggtcttctgtgacaaaggagcagaaagaaaaatccgagatgaagagcggaagcagaacaggaagaaagggaaaggccaggcctcccaaactcaatgcaacagctcctctgatgggaagttggctgccatacctttacagaagaagagtgacatcacctacttcaaaaccatgcctgatctccactcacagccagttctcttcatacctgatgttcactttgcaaacctgcagaggaccggacaggtgtattacaacacggatgatgaacgagaaggtggcagtgtccttgttaaacggatgttccggcccatggaagaggagtttggtccagtgccttcaaagcagatgaaagaagaagggacaaagcgagtgctcttgtacgtgaggaaggagactgacgatgtgttcgatgcattgatgttgaagtctcccacagtgaagggcctgatggaagcgatatctgagaaatatgggctgcccgtggagaagatagcaaagctttacaagaaaagcaaaaaaggcatcttggtgaacatggatgacaacatcatcgagcactactcgaacgaggacaccttcatcctcaacatggagagcatggtggagggcttcaaggtcacgctcatggaaatctagccctgggtttggcatccgctttggctggagctctcagtgcgttcctccctgagagagacagaagccccagccccagaacctggagacccatctcccccatctcacaactgctgttacaagaccgtgctggggagtggggcaagggacaggccccactgtcggtgtgcttggcccatccactggcacctaccacggagctgaagcctgagcccctcaggaaggtgccttaggcctgttggattcctatttattgcccaccttttcctggagcccaggtccaggcccgccaggactctgcaggtcactgctagctccagatgagaccgtccagcgttcccccttcaagagaaacactcatcccgaacagcctaaaaaattcccatcccttctctctcacccctccatatctatctcccgagtggctggacaaaatgagctacgtctgggtgcagtagttataggtggggcaagaggtggatgcccactttctggtcagacacctttaggttgctctggggaaggctgtcttgctaaatacctccagggttcccagcaagtggccaccaggccttgtacaggaagacattcagtcaccgtgtaattagtaacacagaaagtctgcctgtctgcattgtacatagtgtttataatattgtaataatatattttacctgtggtatgtgggcatgtttactgccactggcctagaggagacacagacctggagaccgttttaatgggggtttttgcctctgtgcctgttcaagagacttgcagggctaggtagagggcctttgggatgttaaggtgactgcagctgatgccaagatggactctgcaatgggcatacctgggggctcgttccctgtccccagaggaagccccctctccttctccatgggcatgactctccttcgaggccaccacgtttatctcacaatgatgtgttttgcttgactttccctttgcgctgtctcgtgggaaaggtcattctgtctgagaccccagctccttctccagctttggctgcgggcatggcctgagctttctggagagcctctgcagggggtttgccatcagggccctgtggctgggtctgctgcagagctccttggctatcaggagaatcctggacactgtactgtgcctcccagtttacaaacacgcccttcatctcaagtggccctttaaaaggcctgctgccatgtgagagctgtgaacagctcagctctgagtcggcaggctggggcttcctcctgggccaccagatggaaagggggtattgtttgcctcactcctggatgctgcgttttaaggaagtgagtgagaaagaatgtgccaagatacctggctcctgtgaaaccagcctcaggagggaaactgggagagagaagctgtggtctcctgctacatgccctgggagctggaagagaaaaacactcccctaaacaatcgcaaaatgatgaaccatcatgggccactgttctctttgaggggacaggtttaggggtttgcgttcgcccttgtgggctgaagcactagctttttggtagctagacacatcctgcacccaaaggttctctacaaaggcccagatttgtttgtaaagcactttgactcttacctggaggcccgctctctaagggcttcctgcgctcccacctcatctgtccctgagatgcagagcaggatggagggtctgcttctagctcagctgtttctccttgaggttgcggaggaattgaattgaatgggacagagggcaggtgctgtggccaagaagatctccgagcagcagtgacggggcaccttgctgtgtgtcctctgggcatgttaacccttctgtggggccaaaggtttgcatcgtggatccagctgtgctccagtctgtcccctcctcctccactctgactgccacgccccggaccagcagcttggggaccctccagggtactaatggggctctgttctgagatggacaaattcagtgttggaaatacatgttgtactatgcacttcccatgctcctagggttaggaatagtttcaaacatgattggcagacataacaacggcaaatactcggactggggcataggactccagagtaggaaaaagacaaaagatttggcagcctgacacaggcaacctacccctctctctccagcctctttatgaaactgtttgtttgccagtcctgccctaaggcagaagatgaattgaagatgctgtgcatgtttcctaagtccttgagcaatcatggtggtgacaattgccacaagggatatgaggccagtgccaccagagggtggtgccaagtgccacatcccttccgatccattcccctctgcatcctcggagcaccccagtttgcctttgatgtgtccgctgtgtatgttagctgaactttgatgagcaaaatttcctgagcgaaacactccaaagagataggaaaacttgccgcctcttcttttttgtcccttaatcaaactcaaataagcttaaaaaaaatccatggaagatcatggacatgtgaaatgagcatttttttcttttttttttttaacaaagtctgaactgaacagaacaagactttttcctcatacatctccaaattgtttaaacttactttatgagtgtttgtttagaagttcggaccaacagaaaaatgcagtcagatgtcatcttggaattggtttctaaaagagtaaggcatgtccctgcccagaaacttaggaagcatgaaataaatcaaatgtttattttccttcttatttaaaatcatgcaaatgcaacagaaatagagggtttgtgccaaatgctatgaacggccctttcttaaagacaagcaagggagattgatatatgtacaatttgctctcatgttttaaaaaaaaaaaggtaaatgtaacttaatagttttgtaaatgggagagggggaatctataaactataaatacagttattttattttttgtacatttttaaggagaaaaaataaatattcataacataagagtaaaa

SEQ ID NO: 7517 - DNA, 1025 bp, Homo sapiens; identical to SEQ ID NO: 6638

SEQ ID NO: 7518 - DNA, 1920 bp, Homo sapiens
aaggctcctcagccgagcgccgagcggtcgatcgccgtagctcccgcagcctgcgatctccagtctgtggctcctaccagccattgtaggccaataatccgttatggagcatgcctttaccccgttggagcccctgctttccactgggaatttgaagtactgccttgtaattcttaatcagcctttggacaactattttcgtcatctttggaacaaagctcttttaagagcctgtgccgatggaggtgccaaccgcttatatgatatcaccgaaggagagagagaaagctttttgcctgaattcatcaatggagactttgattctattaggcctgaagtcagagaatactatgctactaagggatgtgagctcatttcaactcctgatcaagaccacactgactttactaagtgccttaaaatgctccaaaagaagatagaagaaaaagacttaaagaagaaacagtgaaaggaatactgttcaattccaacatcagctgtgtaaccgaggcatcgtaatacttttatgacaagtttcactacctttttgcctgtgccagtgtacctcaaagggatatggttgatgtgatcgtgacactgggaggccttgctgggcgttttgaccagattatggcatctgtgaataccttgttccaagcgactcacatcactccttttccaattataataatccaagaggaatcgctgatctacctgctccaaccaggaaagcacaggttgcatgtagacactggaatggagggtgattggtgtggccttattcctgttggacagccttgtatgcaggttacaaccacaggcctcaagtggaacctcacaaatgatgtgcttgcttttggaacattggtcagtacttccaatacctacgacgggtctggtgttgtgactgtggaaactgaccacccactcctctggaccatggccatcaaaagctaacctgttgactggcatccataagtgtgcctctgccttatctcatttctcaacagttcattgctcaacaagaacgattcacctgggtttgcaagaatctaaacctctctaggggaagcccactgggtttaaagatgttagtgtttagataatacaggtaacattataaatgacagatctcaattttatagtagtgggaaagatacatgctaagaaagcaaataagctctattatattcggttggaacctaatgggaatcattccactatacaattcagtactgattattcttcttacattattaatcattccatttatcctagaaaattgtttttaatttgaatcagagaaaactgttgaggttcctcttggagtctagaacatccttaaatgtctaacaacaagggctacctctgagtaccttttagtattagttttctgtatatgatatatattatcttatactgaaaaaaaattcctttcagattggggtgttagaagtgcaccaggtcactctgaccttattactgtctttggtattgtcttaaataaatcaagaatcattgacctaattgttaaatttaaaaataggtagttagcaataggtggaaagagaaatgatgtgaaagataaatgatgattcgtggagccctactcacacattaacccccaaattcaaaagtaagaatgcaaaagtctagagggggtaacagtctgcatcatcatcacaacctaaatggagaaagctgtgcagaggaaacttaagcataaaaattgaattcgtttctgacataccttagactgaaaaactgttggttcatccagaagtgtattcatattaccagaaaatgagtttgtctatggggatacatgaacttcatatactaaggagcctaactccaaagcctgcgttctcatcccagtctgatattcacctaagtttccggacccttttccttagctgt

SEQ ID NO: 7519 - DNA, 2543 bp, Homo sapiens
actggagaggaggcagggacagacccagcagcacccacctgagcgagaagagcagacaccgtgctcctggaatcacccagcatgttgcaaggtctcctgccagtcagtctcctcctctctgttgcagtaagtgctataaaagaactccctggggtgaagaagtatgaagtggtttatcctataagacttcatccactgcataaaagagaggccaaagagccagagcaacaggaacaatttgaaactgaattaaagtataaaatgacaattaatggaaaaattgcagtgctttatttgaaaaaaaacaagaacctccttgcaccaggctacacggaaacatattataattccactggaaaggagatcaccacaagcccacaaattatggatgattgttattatcaaggacatattcttaatgaaaaggtttctgacgctagcatcagcacatgtaggggtctaaggggctacttcagtcagggggatcaaagatactttattgaacctttaagccccatacatcgggatggacaggagcatgcactcttcaagtataaccctgatgaaaagaattatgacagcacctgtgggatggatggtgtgttgtgggcccacgatttgcagcagaacattgccctacctgccaccaaactagtaaaattgaaagacaggaaggttcaggaacatgagaaatacatagaatattatttggtcctggataatggtgagttttaaacagtttgctgggagatgtcactgggtttttcaatgaacgcacatgaagcatggaagcaaagtcaagacatttgagaccaatgtggctgactggctcccaaaggatgaccacaacttttgctacatagctttataaaaagctcaatactcatgtggccttagttggtatggaaatctggactgacaaggataagataaagataaccccaaatgcaagcttcaccttggagaatttttctaaatggagggggagtgttctctcaagaagaaagcgtcatgatattgctcagttaatcacagcaacagaacttgctggaacgactgtgggtcttgcatttatgtctacaatgtgttctccttattctgttggcgttgttcaggaccacagcgataatcttcttagagttgcagggacaatggcacatgaaatgggccacaactttggaatgtttcatgacgactattcttgcaagtgtccttctacaatatgtgtgatggacaaagcactgagcttctatatacccacagacttcagttcctgcagccgtctcagctatgacaagttttttgaagataaattatcaaattgcctctttaatgctccattgcctacagatatcatatccactccaatttgtgggaaccagttggtggaaatgggagaggactgtgattgtgggacatctgaggaatgtaccaatatttgctgtgatgctaagacatgtaaaatcaaagcaacttttcaatgtgcattaggagaatgttgtgaaaaatgccaatttaaaaaggctgggatggtgtgcagaccagcaaaagatgagtgcgacctgcctgaaatgtgtaatggtaaatctggtaattgtcctgatgatagattccaagtcaatggcttcccttgccatcacgggaagggccactgcttgatggggacatgccccacactgcaggagcagtgcacagagctgtggggaccaggaactgaggttgcagataagtcatgttacaacaggaatgaaggtgggtcaaagtacgggtactgtcgcagagtggatgacacactcattccctgcaaagcaaatgataccatgtgtgggaagttgttctgtcaaggtgggtcggataatttgccctggaaaggacggatagtgactttcctgacatgtaaaacatttgatcctgaagacacaagtcaagaaataggcatggtggccaatggaactaagtgtggcgataacaaggtttgcattaatgcagaatgtgtggatattgagaaagcctacaaatcaaccaattgctcatctaagtgcaaaggacatgctgtgtgtgaccatgagctccagtgtcaatgtgaggaaggatggatccctcccgactgcgatgactcctcagtggtcttccgtagacttctccattgtggttggggtgctgttcccaatggcggtcatttttgtggtggttgctatggtaatccggcaccagagctccagagaaaagcagaagaaagatcagaggccactatctaccactggcaccaggccacacaaacagaagaggaaaccccagatggtaaaggctgttcaaccccaagagatgagtcagatgaagccccatgtgtatgatctgccagtagaaggcaatgagcccccagcctcttttcataaagacacaaacgcacttccccctactgttttcaaggataatccagtgtctacacctaaggactcaaatccaaaagcatgaagcaacagctaagcaagaactaatggctaaattatcaacttggaaaactggaaaatctggatggcaga

SEQ ID NO: 7520 - DNA, 2662 bp, Homo sapiens
agcgccctgcacggccgccagccggcctcccgccagccagccccgacccgcggctccgccgcccagccgcgccccagccagccctgcggcaggaaagcatgaagggagacaccaggcatctcaatggagaggaggacgccggcgggagggaagactcgatcctcgtcaacggggcctgcagcgaccagtcctccgactcgcccccaatcctggaggctatccgcaccccggagatcagaggccgaagatcaagctcgcgactctccaagagggaggtgtccagtctgctaagctacacacaggacttgacaggcgatggcgacggggaagatggggatggctctgacaccccagtcatgccaaagctcttccgggaaaccaggactcgttcagaaagcccagcttccctgagacggcgggcaacagcatcggcaggaacgccatggccgtcccctcccagctcttaccttaccatcgacctcacagacgacacagaggacacacatgggacgccccagagcagcagtaccccctacgcccgcctagcccaggacagccagcaggggggcatggagtccccgcaggtggaggcagacagtggagatggagacagttcagagtatcaggatgggaaggagtttggaataggggacctcgtgtggggaaagatcaagggcttctcctggtggcccgccatggtggtgtcttggaaggccacctccaagcgacaggctatgtctggcatgcggtgggtccagtggtttggcgatggcaagttctccgaggtctctgcagacaaactggtggcactggggctgttcagccagcactttaatttggccaccttcaataagctcgtctcctatcgaaaagccatgtaccatgctctggagaaagctagggtgcgagctggcaagaccttccccagcagccctggagactcattggaggaccagctgaagcccatgttggagtgggcccacgggggcttcaagcccactgggatcgagggcctcaaacccaacaacacgcaaccagagaacaagactcgaagacgcacagctgacgactcagccacctctgactactgccccgcacccaagcgcctcaagacaaattgctataacaacggcaaagaccgaggggatgaagatcagagccgagaacaaatggcttcagatgttgccaacaacaagagcagcctggaagatggctgtttgtcttgtggcaggaaaaaccccgtgtccttccaccctctctttgagggggggctctgtcagacatgccgggatcgcttccttgagctgttttacatgtatgatgacgatggctatcagtcttactgcactgtgtgctgcgagggccgagagctgctgctttgcagcaacacgagctgctgccggtgtttctgtgtggagtgcctggaggtgctggtgggcacaggcacagcggccgaggccaagcttcaggagccctggagctgttacatgtgtctcccgcagcgctgtcatggcgtcctgcggcgccggaaggactggaacgtgcgcctgcaggccttcttcaccagtgacacggggcttgaatatgaagcccccaagctgtaccctgccattcccgcagcccgaaggcggcccattcgagtcctgtcattgtttgatggcatcgcgacaggctacctagtcctcaaagagttgggcataaaggtaggaaagtacgtcgcttctgaagtgtgtgaggagtccattgctgttggaaccgtgaagcacgaggggaatatcaaatacgtgaacgacgtgaggaacatcacaaagaaaaatattgaagaatggggcccatttgacttggtgattggcggaagcccatgcaacgatctctcaaatgtgaatccagccaggaaaggcctgtatgagggtacaggccggctcttcttcgaattttaccacctgctgaattactcacgccccaaggagggtgatgaccggccgttcttctggatgtttgagaatgttgtagccatgaaggttggcgacaagagggacatctcacggttcctggagtgtaatccagtgatgattgatgccatcaaagtttctgctgctcacagggcccgatacttctggggcaacctacccgggatgaacaggatctttggctttcctgtgcactacacagacgtgtccaacatgggccgtggtgcccgccagaagctgctgggaaggtcctggagcgtgcctgtcatccgacacctcttcgcccctctgaaggactactttgcatgtgaatagttccagccaggccccaagcccactggggtgtgtggcagagccaggacccaggaggtgtgattcctgaaggcatccccaggccctgctcttcctcagctgtgtgggtcataccgtgtacctcagttccctcttgctcagtgggggcagagccacctgactcttgcaggggtagcctgaggtgccgcctccttgtgcacaaatcagacctggctgcttggagcagcctaacacggtgctcattttttcttctcctaaaactttaaaacttgaagtaggtagcaacgtggctttttttttttcccttcctgggtctaccactcagagaaacaatggctaagataccaaaaccacagtgccgacagctctccaatactcag

SEQ ID NO: 7521 - DNA, 1991 bp, Homo sapiens
aggaaggggaggaggcgaggggagcccgccgcggaggccgagcgagcccccagcccagcctggcgactggggaccccggcacatgaggtggacgcccccggggaagacttgggtgcacagccaggcgagaaggtcttgagtcagacagagcaccagccttggggaccctggaccactatcatggagactgagagcgagcagaactccaattccaccaatgggagttctagctcagggggcagctctcggccccagatagctcaaatgtcactttatgaacgacaagcagtgcaggctctgcaagcactgcagcggcagcccaatgcagctcagtatttccaccagttcatgctccagcagcagctcagtaatgcccagctgcatagcctggctgccgtccagcaggccacaattgctgccagtcggcaggccagctccccaaacaccagcactacacagcagcagactaccaccacccaggcctcgatcaatctggccaccacatcggccgcccagctcatcagccgatcccagagtgtgagctctcccagtgctaccaccttgacccaatctgtgctactggggaacaccacctccccacccctcaaccagtctcaggcccagatgtatctacggccacagctgggaaacctattgcaggtaaaccgaaccctgggtcggaatgtgcctctagcctcccaactcatcctgatgcctaatggggcggtggctgcagtccagcaggaggtgccatctgctcagtctcctggagttcatgcagatgcagatcaggttcagaacttggcagtaaggaatcaacaggcctcagctcaaggacctcagatgcaaggctccactcagaaggccattcctccaggagcctcccctgtctctagcctctcccaggcctctagccaggccctagcggtggcacaggcttcctctggggccacaaaccagtccctcaaccttagtcaagctggtggaggcagtgggaatagcatcccagggtccatgggtccaggtggaggtgggcaggcacatggtggtttgggtcagttgccttcctcaggaatgggtggtgggagctgtcccagaaagggtacaggagtggtgcagcccttgcctgcagcccaaacagtgactgtgagccagggcagccagacagaggcagaaagtgcagcagccaagaaggcagaagcagatgggagtggccagcagaatgtgggcatgaacctgacacggacagccacacctgcgcccagccagacacttattagctcagccacctacacacagatccagccccattcactgattcagcaacagcaacagatccacctccagcagaaacaggtggtgatccagcagcagattgccatccaccaccagcagcagttccagcaccggcagtcccagctccttcacacagctacacacctccagttggcgcagcagcagcagcagcaacaacagcaacagcagcaacagcagcagccgcaagccaccaccctcactgcccctcagccaccacaggtcccacctactcagcaggtcccaccttcccagtcccagcagcaagcccaaaccctggtcgttcagcccatgcttcagtcttcacccttgtctcttccacctgatgcagcccctaagccaccaattcccatccaatccaaaccacctgtagcacctatcaagccgcctcagttaggggccgctaagatgtcagctgcccagcaaccaccaccccatatccctgtgcaagttgtaggcactcgacagccaggggacagcacatgtggtaaagggtggggctaccacctcctcacctgttgtagcccaggtccctgctgccttctatatgcagtctgtgcacttgccgggtaaaccccagacattggctgtcaaacgcaaggctgactctgaggaggagagagatgatgtctccacattgggttcaatgcttcctgccaaggcatctccagtagcag

SEQ ID NO: 7522 - DNA, 3196 bp, Homo sapiens
ctaactgcaacggagagactcaagatgattccctttttacccatgttttctctactattgctgcttattgttaaccctataaacgccaacaatcattatgacaagatcttggctcatagtcgtatcaggggtcgggaccaaggcccaaatgtctgtgcccttcaacagattttgggcaccaaaaagaaatacttcagcacttgtaagaactggtataaaaagtccatctgtggacagaaaacgactgtgttatatgaatgttgccctggttatatgagaatggaaggaatgaaaggctgcccagcagttttgcccattgaccatgtttatggcactctgggcatcgtgggagccaccacaacgcagcgctattctgacgcctcaaaactgagggaggagatcgagggaaagggatccttcacttactttgcaccgagtaatgaggcttgggacaacttggattctgatatccgtagaggtttggagagcaacgtgaatgttgaattactgaatgctttacatagtcacatgattaataagagaatgttgaccaaggacttaaaaaatggcatgattattccttcaatgtataacaatttggggcttttcattaaccattatcctaatggggttgtcactgttaattgtgctcgaatcatccatgggaaccagattgcaacaaatggtgttgtccatgtcattgaccgtgtgcttacacaaattggtacctcaattcaagacttcattgaagcagaagatgacctttcatcttttagagcagctgccatcacatcggacatattggaggcccttggaagagacggtcacttcacactctttgctcccaccaatgaggcttttgagaaacttccacgaggtgtcctagaaaggatcatgggagacaaagtggcttccgaagctcttatgaagtaccacatcttaaatactctccagtgttctgagtctattatgggaggagcagtctttgagacgctggaaggaaatacaattgagataggatgtgacggtgacagtataacagtaaatggaatcaaaatggtgaacaaaaaggatattgtgacaaataatggtgtgatccatttgattgatcaggtcctaattcctgattctgccaaacaagttattgagctggctggaaaacagcaaaccaccttcacggatcttgtggcccaattaggcttggcatctgctctgaggccagatggagaatacactttgctggcacctgtgaataatgcattttctgatgatactctcagcatggatcagcgcctccttaaattaattctgcagaatcacatattgaaagtaaaagttggccttaatgagctttacaacgggcaaatactggaaaccatcggaggcaaacagctcagagtcttcgtatatcgtacagctgtctgcattgaaaattcatgcatggagaaagggagtaagcaagggagaaacggtgcgattcacatattccgcgagatcatcaagccagcagagaaatccctccatgaaaagttaaaacaagataagcgctttagcaccttcctcagcctacttgaagctgcagacttgaaagagctcctgacacaacctggagactggacattatttgtgccaaccaatgatgcttttaagggaatgactagtgaagaaaaagaaattctgatacgggacaaaaatgctcttcaaaacatcattctttatcacctgacaccaggagttttcattggaaaaggatttgaacctggtgttactaacattttaaagaccacacaaggaagcaaaatctttctgaaagaagtaaatgatacacttctggtgaatgaattgaaatcaaaagaatctgacatcatgacaacaaatggtgtaattcatgttgtagataaactcctctatccagcagacacacctgttggaaatgatcaactgctggaaatacttaataaattaatcaaatacatccaaattaagtttgttcgtggtagcaccttcaaagaaatccccgtgactgtctatagacccacactaacaaaagtcaaaattgaaggtgaacctgaattcagactgattaaagaaggtgaaacaataactgaagtgatccatggagagccaattattaaaaaatacaccaaaatcattgatggagtgcctgtggaaataactgaaaaagagacacgagaagaacgaatcattacaggtcctgaaataaaatacactaggatttctactggaggtggagaaacagaagaaactctgaagaaattgttacaagaagaggtcaccaaggtcaccaaattcattgaaggtggtgatggtcatttatttgaagatgaagaaattaaaagactgcttcagggagacacacccgtgaggaagttgcaagccaacaaaaaagttcaaggatctagaagacgattaagggaaggtcgttctcagtgaaaatccaaaaaccagaaaaaaatgtttatacaaccctaagtcaataacctgaccttagaaaattgtgagagccaagttgacttcaggaactgaaacatcagcacaaagaagcaatcatcaaataattctgaacacaaatttaatatttttttttctgaatgagaaacatgagggaaattgtggagttagcctcctgtggtaaaggaattgaagaaaatataacaccttacaccctttttcatcttgacattaaaagttctggctaactttggaatccattagagaaaaatccttgtcaccagattcattacaattcaaatcgaagagttgtgaactgttatcccattgaaaagaccgagccttgtatgtatgttatggatacataaaatgcacgcaagccattatctctccatgggaagctaagttataaaaataggtgcttggtgtacaaaactttttatatcaaaaggctttgcacatttctatatgagtgggtttactggtaaattatgttattttttacaactaattttgtactctcagaatgtttgtcatatgcttcttgcaatgcatattttttaatctcaaacgtttcaataaaaccatttttcagatataaagagaattacttcaaattgagtaattcagaaaaactcaagatttaagttaaaaagtggtttggacttgggaacaggactttatacctcttttactgtaacaagtactcattaaaggaaattga

SEQ ID NO: 7523 - DNA, 554 bp, Homo sapiens
gtgcttcatccaggggctgtttcgcgttgtttgtttgtttgtttcctctgggaattggggggtggggggatgagaaaagatgagaacgaaaagaaaacctcgcctcaccccaagttcccgagccgggggctgaggacttttcgaaggaaagggtccgcctagccctgagtcaagcggtcttactgtaccgccgtgtgcattccctcatacgatcgagcctgcgtgctgccgaagcagggcgccgagtccatgcgaactgccatctgatccgctcttatcaatgaagcagccgatcatggcggatggcccccggtgcaagaggcgcaaacaagccaatcccaggaggaaaaacgtggtgaactatgacaatgtagtggacacaggttctgaaacagatgaggaagacaagcttcatattgctgaggatgacggtattgccaaccctctggaccaggagacgagtccagctagtgtgcccaaccatgagtcctccccacacgtgagccaagctctgttgccaagagaggaagaggaagatgaaataagggagggtg

SEQ ID NO: 7524 - DNA, 1245 bp, Homo sapiens
aacccctggtagccccgacttctttttaattaaaataaggtaagcccttcaatttgtttcttcaatatttctttcatttgtagggatatttgtttttcatatcagactaataaaaagaaattagaaaccaagtacttttttttttttacttaaatattttgccgtgggtggatgttaaagaaggccgtggtaatttacaggatgggttccaagttctcttcttctggggctttaaggcagatttccagcagacctctttccggtcacaagttcagtcacaagacagagaccccagagttagcgttgtctacctgggacatctcccagccccccttcaccctcacaaattctgcagtgtgtttttaatgatgtgtctttgggtgatgagtatgctctgggactaggtggaggtggtggttgcatctcccatgtagctcatggtcaatacaggtggtgattgtacaatattgtgaatatatgaaacaccattgaaggaggggggaaggaaagaaagaaaaataggagaagaaaggaagaaagaaagctgggggtctagtgaaaaccattttacagaagtaaagtaggcaaaaagttaaaaggataaatggttgcaggaaagtaaacagttccaggtgcaggggctttaagactattacaggctaacatttgacttttagaaaagtaattgtttcgtttagagaaaaaaaaatatgactcctgtaaagtaataaacctacatgcaaaaataaggatgcagggggaggccgagagcattaaatttgcctctataatatcatatcaacacattttaatctctcaaccagggctaataattcactcactgtctccaggggactacattaacagttcttccaatattgggcctttatatcatcagctaaccatatgcttccctgagcgcctgagtgatcccagtttctggaacactattcctttctctcaaattcagtaaataaaaagttaaagcgctatattgttttatatgagtacgacctttaagattcactgatgactatttctcaacagttgttaaatatttttacatcagtcaggcccacaagcaatgttaactggtaggaagttagctggtcctgtcaatgttaaatccaaacgggcttaaccaacagcaaaagttgccaaactaagggatttttttttgtttttttaatcttaaggtatggtaagaaaaatgttcaaagacattagattcaaataatttcacac

SEQ ID NO: 7525 - DNA, 922 bp, Homo sapiens; identical to SEQ ID NO: 6503

SEQ ID NO: 7526 - DNA, 634 bp, Homo sapiens
caccaagcaggcccaacgtggttcttccaacgtcttttccatgtttgaacaagcccagatacaggagttcaaagaagccttcagctgtatcgaccagaatcgtgatggcatcatctgcaaggcagacctgagggagacctactcccagctggggaaggtgagtgtcccagaggaggagctggacgccatgctgcaagagggcaagggccccatcaacttcaccgtcttcctcacgctctttggggagaagctcaatgggacagaccccgaggaagccatcctgagtgccttccgcatgtttgaccccagcggcaaaggggtggtgaacaaggatgaccaacccttccctgcgccatgggagcctccgtacccaccttccctgtgcagtcactcccccgcagtctcctgctcagaccctcctcaccccccaggttcaagcagcttctcctgacccaggcagacaagttctctccagctgaggtggagcagatgttcgccctgacacccatggacctggcggggaacatcgactacaagtcactgtgctacatcatcacccatggagacgagaaagaggaatgaggggcagggccaggcccacgggggggcacctcaataaactctgttgcaaaat

SEQ ID NO: 7527 - DNA, 4105 bp, Homo sapiens; identical to SEQ ID NO: 690

SEQ ID NO: 7528 - DNA, 1368 bp, Homo sapiens
ttagtcggtgccaggtcccaaagacgcagctgcgcgggtgtgccgggaggagccccggaatccacaggctgcgagccagcacaggccagccagaagatgacactgagactacaggtttggaaggcggcgttgccatgccaggtgccgaagatgatgtggtgactccaggaaccagcgaagaccgctataagtctggcttgacaactctggtggcaacaagtgtcaacagtgtaacaggcattcgcatcgaggatctgccaacttcagaaagcacagtccacgcgcaagaacaaagtccaagcgccacagcctcaaacgtggccaccagtcactccacggagaaagtggatggagacacacagacaacagttgagaaagatggtttgtcaacagtgaccctggttggaatcatagttggggtcttactagccatcggcttcattggtgcaatcatcgttgtggttatgcgaaaaatgtcgggaaggtactcgccctaaagagctgaagggttacgccctgctgccaacgtgcttaaaaaaagaccgtttctgactctgtgccctgtccctgagctcgtgggagaagatgacccgtggaacacttgcctggcccactcagaatccacggtgacctctccgcttgccaaaataaccgaaggaaagaccgttcaccagacttggctcctctaaacatttgctgttcaaacatgtttttgaatatacattctataaaagattatttgaaagacaaaattcatagaaaatggagcaaaactgtataaactgatttgtaactaacactggaccattggatcgatattatatgctgtaaccatgtgtctccgtctgaccattcttgttattgttaaaatgcagaggaatctggaaatatttatatccacggagtccttggatccagtgctacgtcagtaaatagcaccagcattttgcaattgctgatctgctgaaatgtacacattctggtctagtttggtctatcttttaaagcctgatctggtgtgaataatcaactaggaaatctaaacttggataacacgtggtgaacaactgcctttagctggtccagattaatcatttcaaagacatccattttagatcacaagcaggaagtcgatagtctcaaaggcactttgtttctcccaagtaggccaccaggcagcctctagagttgctttacccaaatccttctccagccatgacttggtgactctaagcttgctcccacctgccccctccacttccctcagatgatgaggagccagggctaagggggcagccttctctcttcccagtgatgcacatccttcacattggctgctttgttctggaatatggatatctcagcctg

SEQ ID NO: 7529 - DNA, 3814 bp, Homo sapiens
acttgacaaccagcatgccgagatggcacaccttgggcccaccccacctccacatagccttaattacaaatcagaggacaggcttagtgagcaagactggccagcatatttcaaggtcccatgttgtggggttgatacatctcaaattgagtcagaagaggcagaagtggatgtgagagaaagagagacacagagagacagagagccaaagagggcaagagacttgactttaagagactcctgtactgacaactccatgcagttcggaaccagaacgactacggctgaaccagggttcatggggacatggcaaaacgctgatactaacctcttattcagaatgtcccaacaggttccattggcatgtactggcagagtgctgggggcagacttctgcccaaacctggaggagccataccacaggctggaagtccaggccatccgttgcacactggtaaactgcacatgtgaatgttttcagccagggaagattaacctgaggacttgtgatcagtgtaaacatggctgggtggcacatgccttggataagctcagcacgcagcacctgtaccaccccacccaagtggagattgtgcagtccaacgtcgtgtttgacatcagcagcctgatgctctatgggacacaagcagtgcctgtgcggctaaagatcctgctggaccgtctcttcagcgtcctgaagcaagaggaggtactgcacatactgcacggccttggctggactctgcgggactatgtccgaggatacatccttcaggatgctgctggcaaggtgctggaccgctgggccatcatgtctcgagaagaggaaatcatcacccttcagcagtttctgcggtttggagaaaccaaatccattgtggagctgatggcaattcaggagaaagaagggcaggccgtggctgtaccatcttcaaagacagactcagatataaggactttcattgagagcaataatcgcaccaggagtcccagcctccttgctcacttagagaacagcaatccttccagcattcatcacttcgaaaacatcccaaacagccttgcatttctgcttccattccagtacataaaccctgtctcagcaccactgctagggttgcctccaaatgggctactgttagagcaaccagggttgaggctgcgggaacccagcctttcaactcagaatgaatataatgagagcagcgaatccgaagtttctcccacaccttataagaatgatcaaacacccaatagaaatgccctgaccagcattactaatgtggagcccaaaaccgagccagcctgtgtctctcccattcagaattctgccccagtcagtgatctaaccaaaactgaacacccaaaaagctcattccggattcatcggatgagaaggatggggtcagcctctaggaaaggaagagtgttctgtaatgcatgtgggaagacattctatgacaaaggtactctcaaaattcattacaatgctgttcacctgaagatcaaacatcgatgcaccattgaaggttgcaacatggtctttagctccctccgaagtcgtaatcgccacagtgcaaaccccaatcctcgccttcacatgcctatgctaaggaataaccgagataaagatttaattcgggccacctcaggagctgccacccctgtcatagcaagtacaaaatcaaatctggcactcacaagccctggccgacccccaatgggttttaccactccccctctagaccctgtcttgcaaaatcctctccctagccagctagtattttctgggctaaagactgtacaaccagttcctccattttatagaagtttactcactccaggggaaatggtgagtcctccaacctccctcccaaccagtcccatcattccaaccagtggtaccatagagcagcaccccccgccaccctctgagccagtagtgccagcagtgatgatggccacccatgagcccagtgctgacctggcacccaagaaaaagcccaggaagtcaagcatgcctgtgaagattgagaaggaaattattgataccgccgatgagtttgatgatgaagatgatgaccccaatgatggtggagctgtggtcaatgacatgagccatgacaatcattgtcactcccaagaggagatgagcccaggcatgtctgtgaaggacttttctaagcataacaggacccggtgcatttcaaggactgaaataaggagggccgacagcatgacttctgaagaccaagaacctgagcgggactatgagaacgagtctgagtcttcggagcccaaactgggcgaggaatccatggaaggggatgagcacattcacagcgaagtgagtgaaaaagtcctgatgaatagtgagaggcctgatgagaaccacagtgagccctctcaccaggacgtcatcaaggtgaaggaagaatttacagaccccacttacgacatgttttacatgagccagtatggactgtacaatggtgggggtgccagcatggccgccttgcatgagagctttacatcgtctctgaattatggcagccctcaaaagttctccccagaaggtgacctatgttctagcccagaccccaaaatctgttatgtgtgcaagaagagtttcaaaagctcctacagtgtgaaacttcactacaggaacgttcacttgaaagagatgcacgtctgcacagtggctggttgcaatgctgcattcccctctcgccgaagccgagacagacacagtgccaacataaacctacatcgtaaactgttgaccaaagaactcgatgacatgggcctggactcgtcgcagccctcccttagcaaggacctccgcgatgaatttttggtgaagatatatggtgcccagcaccccatggggctcgatgtcagggaagacgcctcctctcccgcagggactgaagactcccacctgaacgggtatgggagaggcatggcagaggactacatggtccttgacttgagcaccacctccagcctccagtccagcagcagtatccattcctccagagaatccgacgcaggcagcgatgaggggattcttctcgatgacattgacggggcgagtgacagtggggagtcggcacacaaggccgaggcccctgccctccctggcagcctaggggctgaagtttcaggatctcttatgttcagcagcttgtctgggagcaatggtgggatcatgtgcaacatttgccacaaaatgtacagcaacaaggggaccctgagagtgcactacaaaactgtgcatttgagagaaatgcacaagtgcaaagtcccaggttgcaatatgatgttttcctctgtacgaagccgaaatcggcacagtcagaaccctaatctccacaaaaacattcccttcacttcagtagattagtctcagaatggacactacaaatgccagctctcaccagatggcctacgtgtttgaactgccatagtcagtgtgcgcttatgtacttggggtgtgtgtgtgtgtgtgtgtgtgtgtgcatttatgtatgctctgtggctacatatacacacacgtatttccttgagataaacaagataaacactaggtgcttttgaatttttttcacttccctttatagttttgggaaaggagtgggatctttgatttcagggtgaaaacagagtacccctttaaacacacacacacacacatgcacatacacacacacacacacacacacacacagtgtgcaactagccccagttttgacagaataattcttggtcttccccaaagagacaatttgttgtacccatgactgttgcctgc

SEQ ID NO: 7530 - DNA, 530 bp, Homo sapiens
aaggacagagacgctggctaggtaagataaggaggcaagatgtgtgagcagcatccaaagaggcctgggcttcagttgtggagagggagagagccaggttggaatgggcagcaggccgccctccccactgttaccaacatgaagctgctcgcagcaactgtgctactcctcaccatctgcagccttgaaggagctttggttcggagacaggcaaaggagccatgtgtggagagcctggtttctcagtacttccagaccgtgactgactatggcaaggacctgatggagaaggtcaagagcccagagcttcaggccgaggccaagtcttactttgaaaagtcaaaggagcagctgacacccctgatcaagaaggctggaacggaactggttaacttcttgagctatttcgtggaacttggaacacagcctgccacccagtgaagtgtccagaccattgtcttccaaccccagctggcctctagaacacccactggccagtcctagagctcctgtccctacccactctttgc

SEQ ID NO: 7531 - DNA, 2714 bp, Homo sapiens
atgaagccgcccggcagcagctcgcggcagccgcccctggcgggctgcagccttgccggcgcttcctgcggcccccaacgcggccccgccggctcggtgcctgccagcgccccggcccgcacgccgccctgccgcctgcttctcgtccttctcctgctgcctccgctcgccgcctcgtcccggccccgcgcctggggggctgctgcgcccagcgctccgcattggaatgaaactgcagaaaaaaatttgggagtcctggcagatgaagacaatacattgcaacagaatagcagcagtaatatcagttacagcaatgcaatgcagaaagaaatcacactgccttcaagactcatatattacatcaaccaagactcggaaagcccttatcacgttcttgacacaaaggcaagacaccagcaaaaacataataaggctgtccatctggcccaggcaagcttccagattgaagccttcggctccaaattcattcttgacctcatactgaacaatggtttgttgtcttctgattatgtggagattcactacgaaaatgggaaaccacagtactctaagggtggagagcactgttactaccatggaagcatcagaggcgtcaaagactccaaggtggctctgtcaacctgcaatggacttcatggcatgtttgaagatgataccttcgtgtatatgatagagccactagagctggttcatgatgagaaaagcacaggtcgaccacatataatccagaaaaccttggcaggacagtattctaagcaaatgaagaatctcactatggaaagaggtgaccagtggccctttctctctgaattacagtggttgaaaagaaggaagagagcagtgaatccatcacgtggtatatttgaagaaatgaaatatttggaacttatgattgttaatgatcacaaaacgtataagaagcatcgctcttctcatgcacataccaacaactttgcaaagtccgtggtcaaccttgtggattctatttacaaggagcagctcaacaccagggttgtcctggtggctgtagagacctggactgagaaggatcagattgacatcaccaccaaccctgtgcagatgctccatgagttctcaaaataccggcagcgcattaagcagcatgctgatgctgtgcacctcatctcgcgggtgacatttcactataagagaagcagtctgagttactttggaggtgtctgttctcgcacaagaggagttggtgtgaatgagtatggtcttccaatggcagtggcacaagtattatcgcagagcctggctcaaaaccttggaatccaatgggaaccttctagcagaaagccaaaatgtgactgcacagaatcctggggtggctgcatcatggaggaaacaggggtgtcccattctcgaaaattttcaaagtgcagcattttggagtatagagactttttacagagaggaggtggagcctgccttttcaacaggccaacaaagctatttgagcccacggaatgtggaaatggatacgtggaagctggggaggagtgtgattgtggttttcatgtggaatgctatggattatgctgtaagaaatgttccctctccaacggggctcactgcagcgacgggccctgctgtaacaatacctcatgtctttttcagccacgagggtatgaatgccgggatgctgtgaacgagtgtgatattactgaatattgtactggagactctggtcagtgcccaccaaatcttcataagcaagacggatatgcatgcaatcaaaatcagggccgctgctacaatggcgagtgcaagaccagagacaaccagtgtcagtacatctggggaacaaaggctgcagggtctgacaagttctgctatgaaaagctgaatacagaaggcactgagaagggaaactgcgggaaggatggagaccggtggattcagtgcagcaaacatgatgtgttctgtggattcttactctgtaccaatcttactcgagctccacgtattggtcaacttcagggtgagatcattccaacttccttctaccatcaaggccgggtgattgactgcagtggtgcccatgtagttttagatgatgatacggatgtgggctatgtagaagatggaacgccatgtggcccgtctatgatgtgtttagatcggaagtgcctacaaattcaagccctaaatatgagcagctgtccactcgattccaagggtaaagtctgttcgggccatggggtgtgtagtaatgaagccacctgcatttgtgatttcacctgggcagggacagattgcagtatccgggatccagttaggaaccttcacccccccaaggatgaaggacccaaggtgaatatggccacaagcaggctaataggggccgtggccggcaccattctggccctgggggtgatttttggaggcacagggtggggaatagaaaatgtcaagaagagaaggttcgatcctactcagcaaggccccatctgaatcagctgcgctggatggacaccgccttgcactgttggattctgggtatgacatactcgcagcagtgttactggaactattaagtttgtaaacaaaacctttgggtggtaatgactacggagctaaagttggggtgacaaggatggggtaaaagaaaactgtctcttttggaaataatgtcaaagaacacctttcaccacctgtcagtaaacggg

SEQ ID NO: 7532 - DNA, 995 bp, Homo sapiens; identical to SEQ ID NO: 4378

SEQ ID NO: 7533 - DNA, 1991 bp, Homo sapiens
atttttccacccagcaggatgggtgatgctgagagctgcctgctcagacaacagacacgcgaggtcaggaagaagccgcttataaattaccgcttccttcgcgccgccgccaacgccgagccccgaggaccgcaagcccagaggacaagctgcgccaagagggagtgctggagctgttcacccagcgggtcagagagcgagccgggcaggccagcccccggccggcggaaccctggcacagcctgagcagatgctgcgggcggcgccgcagccaccccagatccagaaccagaaccacagcccttctgaggagctcccaaacaaagcaaggagatggccaccaaggagaagctgcagtgtctgaaagatttccacaaggacatcctgaagccctcaccagggaagagcccaggcacgcggcctgaggacgaggctgagggaaaacctccgcagagggagaagtggtctagcaagatcgactttgtgctctctgtggctggcggcttcgtgggcttgggcaacgtctggcgcttcccgtacctctgctacaagaatggtggaggtgcgtttctcataccgtattttattttcctgtttgggagcggcctgcctgtgtttttcttggagatcatcataggccagtacacctctgaagggggcatcacctgctgggaaaagatctgccccttgttctctggtatcggctatgcctccgttgtaattgtgtccctcctgaatgtctactacatcgtcatcctggcctgggccacatactacctgttccagtccttccagaaggagctgccctgggcacactgcaaccacagctggaacacacctcactgcatggaggacaccatgcgcaagaacaagagtgtctggatcaccatcagctccaccaacttcacctcccctgtcatcgagttctgggagcgcaacgtgctgagcttgtcccctggaatcgaccacccaggctctctgaaatgggacctcgctctctgccttcttttagtctggctagtgtgtttcttctgcatctggaagggcgtcaggtccactgggaaggtcgtctacttcacagccacttttccattcgccatgctcctggtgctgctggtccgagggctgacgctgccgggcgcgggcgcaggcatcaagttctatctgtatcctgacatcacccgccttgaggacccacaggtgtggattgacgctgggactcagatattcttctcttatgccatctgcctgggggctatgacctcgctggggagctacaacaagtacaagtataactcgtacaggtcctggcctggccttcattgcctacccaaaagctgtgacaatgatgccgctgcccacattttggtccattcttttttttattatgcttctcttgcttggactggatagccagtttgttgaagttgaaggacagatcacatccttggttgatctttacccatccttcctaaggaagggttatcgtcgggaaatcttcatcgccttcgtgtgtagcatcagctacctgctggggctgacgatggtgacggagggtggcatgtatgtgtttcagctctttgactactatgcagctagcggtgtatgccttttgtgggttgcattctttgaatgttttgttattgcctggatatatggtgagtacagattttttcatgtcctttctcaaggctctcctttgggcttctctacttagaagcttcagaagcagagaatactaacagaaattcaatttgagttgaacagtaggccctccctacctagactacacaaataatctcactgtagccacactgaagatcctcctggtgctaaaggtgtgaggtgtgactggatgttttcacagtttcagaacttggttgtgcaggacctggaatactccttttttatctccttgaggccttgggtttgagtttgggctgtgcctaagattgcacacctagggtttggagtgtgcctcagattgccag

SEQ ID NO: 7534 - DNA, 2314 bp, Homo sapiens
atggaggtggaggactcgggcggcgtggtgctgaccgcctaccactcgtacgcgcgcgcccagccccccaacgccgagtcgcgctgcgcgccccgcgccgcagccagccacccgctcagcagaaaatccattcctcgctgccgaagaattaacaggatgctctccaatgaatccctccatcctcctgccttcagccgttccaactcagaagcctccgtagacagcgcctccatggaggatttctggcgggaaatagaaagtattaaagacagcagcatgggagggcaagaagagccaccgccagctgaggtcacacctgtggatgaaggagaacttgaagcagaatggctgcaagatgtgggtttatcaactctgatctcaggtgatgaagaggaagatggcaaagccttgctctccacattgactcgaacccaagcagctgccgtgcaaaagagataccatacctatacccaaaccatgaggaaaaaggataagcaatctatcagggatgtcagagacatttttggagtcagtgaatctcctcctcgtgatacctgtggcaaccacactaatcagctggatggcaccaaggaagaaagagagcttccaagagttatcaagacaagtggttccatgccagatgatgcttctctcaacagtactaccctgtctgacgcatcccaggataaagaagggagttttgcggttcccaggagtgactctgtggctatacttgagaccattccagttctaccagttcattccaatggatcaccggagcctggacagccagttcagaatgcgataagtgatgatgattttctggaaaagaacattccaccagaggctgaagagctgtcatttgaagtgtcttattcagaaatggttacggaggctctaaaaagaaataaacttaagaaatcagagattaagaaagaagactatgttttaactaaatttaatgttcagaaaaccagatttggcttaactgaagcaggagatctgtctgctgaagacatgaagaaaatccgccatctctctctgattgaattgactgccttttttgatgcctttggaattcaactgaaaaggaacaaaacagagaaagtaaaaggacgagacaatgggatttttggagttccacttacagtcctcctggacggtgaccgaaagaaagaccctggagtgaaagttcccctggtattacaaaaattttttgagaaagttgaggaatcaggtctggaatctgaaggaatttttcgactttcaggatgtactgctaaagtcaagcaataccgtgaagaacttgatgccaagtttaatgctgataaatttaaatgggacaaaatgtgccatagagaagctgcagtaatgttgaaagcgtttttcagagaactacccacctctctcttccctgtggaatatatacctgccttcatcagtctaatggaaagagggcctcacgtcaaagtacagtttcaagccttacacctcatggtcatggcgctgcctgatgccaacagagatgcagctcaggccctcatgacattcttcaataaagtgattgccaatgaatcaaaaaaccgaatgagtctgtggaacatttctacagtgatggcaccaaaccttttcttcagtagaagcaaacactctgattatgaagaattactgttagcaaacactgcggcccacatcatccgcctaatgcttaagtaccagaagattttgtggaaggttccatctttcttaatcactcaagtaagaagaatgaatgaagccacgatgctattgaagaagcagctcccaagtgtcaggaagctgctcaggaggaagaccctcgagcgggagactgcaagccccaagacttcaaaggtactgcaaaaatcaccctcggcaagacgaatgtctgacgtgccggaaggagtcatacgggtccatgctccacttctctccaaggtgtccatggccattcaactcaacaatcaaaccaaagccaaagacatattggcaaaatttcaatatgaaaacagaatactgcactggcagcgagctgcactttccttcctaaatggaaaatgggttaaaaaagaaagagaagagtcgacagagaccaacaggagccccaaacatgtattcctcttcactattggcctggacatctccacataggcagtcatatagagacttgaaatatcattcaagggatttgggtatccagtagacttttagttacatatactacaaaactgactttgtactctcaagtagacctttcgtagaaagaaaatgtttctaataaaaatgtattagaact

SEQ ID NO: 7535 - DNA, 6700 bp, Homo sapiens
ggaactatctcctgagtgctgcaagttgtaacgggcaccgctgagcctgtttccctttggagcacttcttatctagaagcagtgtttagtttcttccaaactgggccacttcgtccacctactctgttctgagtaaggaaacagcctccaagcatcagcagagcccagatgagcacgggccgcggagccgcttagcagtctcccgggacccagctccggaggagccgcaagcatgcaccctgggttgtggctgctcctggttacgttgtgcctgaccgaggaactggcagcagcgggagagaagtcttatggaaagccatgtgggggccaggactgcagtgggagctgtcagtgttttcctgagaaaggagcgagaggacgacctggaccaattggaattcaaggcccaacaggtcctcaaggattcactggctctactggtttatcgggattgaaaggagaaaggggtttcccaggccttctgggaccttatggaccaaaaggagataagaagttctccatcccagttctgctcatttatgattctcgccctggccaccctggacaaccaggccccagaggcccacctggtctggatggctgtaatggaactcaaggagctgttggatttccaggccctgatggctatcctgggcttctcggaccacccgggcttcctggtcagaaaggatcaaaaggtgaccctgtccttgctccaggtagtttcaaaggaatgaaggcatttattccactgtttgaatctatcagaggcccacaaggagcacccggatttcctggagctgtaggacctgcaggaccaccaggattacaacaagggcaacctccattcttggaggttttgtttcctcattggcatgagggtgaagaggccaaagtaagagacagtttatttggggatgttggcctccctggcccagcaggacctccaccatctactggagagctggaattcatgggattccccaaagggaagaaaggatccaagggtgaaccagggcctaagggttttccaggcataagtggccctccaggcttcccgggccttggaactactggagaaaagggagaaaagggagaaaagggaatccctggtttgccaggacctaggactctcttatgctctcatactttccacttagtggtaactatgtttctgtcacagggcaagaaagggaccctgggatttcctgggcttaatggattccaaggaattgagggtcaaaagggtgacattggcctgccaggcccagatgttttcatcgatatagatggtgctgtgatctcaggtaatcctggagatcctggtgtacctggcctcccaggccttaaaggagatgaaggcatccaaggcctacgtggcccttctggtgtccctggattgccagcattatcaggtgtcccaggagccctagggcctcagggatttccagggctgaagggggaccaaggaaacccaggccgtaccacaattggagcagctggcctccctggcagagatggtttgccaggcccaccaggtccaccaggcccacctagtccagaatttgagactgaaactctacacaacaaagagtcagggttccctggtctccgaggagaacaaggtccaaaaggaaacctaggcctcaaaggaataaaaggagactcaggtttctgtgcttgtgacggtggtgttcccaacactggaccacccggggaaccaggcccacctggtccatggggtctcataggccttccaggccttaaaggagccagaggagatcgaggctctgggggtgcacagggcccagcaggggctccaggcttagttgggcctctgggtccttcaggacccaaaggaaagaagggggaaccaattctcagtacaatccaaggaatgccaggagatcggggtgattctggctcccagggcttccgtggtgtaataggagaaccaggcaaggacggagtaccaggtttaccaggtctgccaggccttccgggtgatggtggacagggcttcccaggtgaaaaggggttacctggacttcctggtgaaaaaggccatcctggtccacctggcctcccaggaaatgggttaccaggacttcctggaccccgtgggcttcctggagataaaggcaaggatggattaccgggacaacaaggccttcccggatctaagggaatcaccctgccctgtattattcctgggtcatacggtccatcaggatttccaggcactcccggattcccaggccctaaagggtctcgaggcctccctgggaccccaggccagcctgggtcaagtggaagtaaaggagagccagggagtccaggattggttcatcttcctgaattaccaggatttcctggacctcgtggggagaagggcttgcctgggtttcctgggctccctggaaaagatggcttgcctgggatgattggcagtccaggcttacctggttccaagggagccactggtgacatctttggtgctgaaaatggtgctccgggggaacaaggcctacaaggattaacagggcacaaaggatttcttggagactctggccttccaggactcaagggtgtgcacgggaagcctggcttactaggccccaaaggtgagcggggcagccctgggacaccaggacaggtgggacagccaggcaccccaggatctagtggtccatatggcatcaagggcaaatctgggctcccaggagcaccaggcttcccaggcatctcaggacatcctggaaagaaaggaacaagaggcaagaaaggtcctcctggatcaattgtaaagaaagggctgccagggctaaaaggccttcctggaaatccaggcctagtaggactgaaaggaagcccaggctctccaggggtcgctgggttgccagccctctctggacccaagggagagaaggggtctgttggattcgtaggttttccaggaataccaggtctgcctggtattcctggaacaagaggattaaaaggaattccaggatcaactggaaaaatgggaccatctggacgtgctggtactcctggtgaaaagggagacagaggcaatccggggccagtcggaatacctagtccaagacgtccaatgtcaaacctttggctcaaaggagacaaaggctctcaaggctcagccggatccaatggatttcctgggccaagaggtgacaaaggagaggctggtcgacctggaccaccaggcctacctggagctcctggcctcccaggcattatcaaaggagttagtggaaagccagggccccctggcttcatgggaatccggggcttacctggcctgaaggggtcctctgggatcacaggtttcccaggaatgccaggagaaagtggttcacaaggtatcagagggtcgcctggactcccaggagcatctggtctcccaggcctgaaaggagacaacggccagacagttgaaatttccggtagcccaggacccaagggacagcctggcgaatctggttttaaaggcacaaaaggaagagatggactaataggcaatataggcttccctggaaacaaaggtgaagatggaaaagttggtgtttctggagatgttggccttcctggagctccaggatttccaggagttgccggcatgagaggagaaccaggacttccaggttcttctggtcaccaaggggcaattgggcctctaggatcccccggattaataggacccaaaggcttccctggatttcctggtttacatggactgaatgggcttccgggcaccaagggtacccatggcactccaggacctagtatcaccggtgtgcctgggcctgctggtctccctggacccaaaggagaaaaaggatatccaggaattggcatcggagctccagggaagccgggcctgagagggcaaaaaggtgatcgaggtttcccaggtctccagggccctgctggtctccccggtgccccaggcatctccttgccctcactcatagcaggacagcctggtgaccccgggcgaccaggcctagatggagaacgaggccgcccaggccccgctggacccccaggtccccctgggccatcctcgaatcaaggcgacaccggagaccctggcttccctggaattcctggacctaaagggcctaagggagaccaaggaattccaggtttttctggcctccctggagagctaggactgaaaggcatgagaggtgagcctggcttcatggggactccaggcaaggttgggccacctggagacccaggatttcccggaatgaaggggaaggcagggccaagaggctcttctggcctccaaggtgatcctggacaaacaccaactgcagaagctgtccaggttcctcctggacccttgggtctaccagggatcgatggcatccctggcctcactggggaccctggggctcaaggccctgtaggcctacaaggctccaaaggtttacctggcatccccggtaaagatggccccagtgggctcccaggcccacctggggctcttggtgatcctggtctgcctggactgcaaggccctccaggatttgaaggagctccagggcagcaaggccccttcgggatgcctggaatgcctggccagagcatgagagtgggctacacgttggtaaagcacagccagtcggaacaggtgcccccgtgtcccatcgggatgagccagctgtgggtggggtacagcttactgtttgtggaggggcaagagaaagcccacaaccaggacctgggctttgctggctcctgtctgccccgcttcagcaccatgcccttcatctactgcaacatcaacgaggtgtgccactatgccaggcgcaatgataaatcttactggctctccactaccgcccctatccccatgatgcccgtcagccagacccagattccccagtacatcagccgctgctctgtgtgtgaggcaccctcgcaagccattgctgtgcacagccaggacatcaccatcccgcagtgccccctgggctggcgcagcctctggattgggtactctttcctcatgcacactgccgctggtgccgagggtggaggccagtccctggtctcacctggctcctgcctagaggactttcgggccactcctttcatcgaatgcagtggtgcccgaggcacctgccactactttgcaaacaagtacagtttctggttgaccacagtggaggagaggcagcagtttggggagttgcctgtgtctgaaacgctgaaagctgggcagctccacactcgagtcagtcgctgccaggtgtgtatgaaaagcctgtagggtggcacctgccactctgccccttgccctcccctgcccctcacaacagtcacctcacaaacctgaatggtctgaagaaggaaggcctgagcccctttgcctgtcaagttgtacattggagtctcatttgggctagactaccggacactcgtcaccccagccctcgggtccatagagatgagcccaccctgctgagatctgctgtcctgtttctgtcaagctggtgctactgtttgatttggatgattgtgtgactattcatggctacctcagaaagatttgatgggccacaactgtcttagactgctagctttctccttaccgtcttgatcggaaagctcttcctaatcgctaatcagtcatttcttcatgtacagaggtcagcacacattatttggcttaaaccagaacccagtgtttccacacttaaattctctaaccgaatattcatggatggctcaagtctgcacagagcaagtcctcactcttcaaggaggcccactgtgtctaggcaggcaagagaattgaaatgaggtgccacccagtagcccagagtgagctttagctctctctagaatgagcaagactgggccccacatggcttagagaggcttgaaggccagcagctgggttgggggtggtggtcattaatggcatatggtcctagacaaaccatctcctccttgccggctccccctccagccagagacagaggatgtggcctggttcaaagtaaagcagaggatgcaacaaatgtggccaagcctatcaaaggaaatgagaatgacagccttttttcctgggccagaagtagaggggtgggtgcgtaaggatgtgtgagttttgcttttgactccaggaacaaaaaggtaaatcccacatcccagtttctcagaagtccctgtttattccaaatgccatccagatgtgtgcaatgtggcaaactgaagctgcacagtgttggtttccttgtattctgaggatgttaaagactttgttaaatggttatccaattgctctttcacaggtagcctattaaactattttaatatgtttttttaaacctcataaaaatctagcacactcttctcttgagcagttagcagacctaaagcaagcctgaattggctatgcagtacattgtattctgtttgggggaatttgttttagccattttctttaattaccagttttccagaacactcttagctatgttgacatgaggcagttccttccaggtgattctgtttccttaagtattatataaactgtgccaatacagacaaagcataatcaatataatctgaattattgttatctttacctcctgagtaataagcatggtgtcagttttgtacatagcaaataaaataaatgaaatctgaacatgtg

SEQ ID NO: 7536 - DNA, 1774 bp, Homo sapiens
agttataagagacaggaataccagtgagaagtatgagagagtgggtgggagataatgtttagaatctcttttgctgcccgcaatttatgaaaatggcttgaaaatatttatggtcaaagaccgaaatatttcttcaaagaagattagctttgctccattaaaagtaatgagtagaaatattaaaaaaaaaaaaagttttaagtacctgagtatcttgccagcaactgaccaccactgctaaaagtgaggagagacacagctttcatcattgggactgcagtttatttcaggacaaagagatcttcaaaaatcaaaaatgaggttcacatttacaagccggtgcttggcactgtttcttcttctaaatcacccaaccccaattcttcctgccttttcaaatcaaacctatccaacaatagagcccaagccatttctttacgtcgtaggacgaaagaagatgatggatgcacagtacaaatgctatgaccgaatgcagcagttacccgcataccaaggagaaggtccatattgcaatcgcacctgggatggatggctgtgctgggatgacacaccggctggagtattgtcctatcagttctgcccagattattttccggattttgatccatcagaaaaggttacaaaatactgtgatgaaaaaggtgtttggtttaaacatcctgaaaacaatcgaacctggtccaactatactatgtgcaatgctttcactcctgagaaactgaagaatgcatatgttctgtactatttggctattgtgggtcattctttgtcaattttcaccctagtgatttccctggggattttcgtgtttttcaggagccttggctgccaaagggtaaccctgcacaagaacatgtttcttacttacattctgaattctatgattatcatcatccacctggttgaagtagtacccaatggagagctcgtgcgaagggacccggtgagctgcaagattttgcattttttccaccagtacatgatggcctgcaactatttctggatgctctgtgaagggatctatcttcatacactcattgtcgtggctgtgtttactgagaagcaacgcttgcggtggtattatctcttgggctgggggttcccgctggtgccaaccactatccatgctattaccagggccgtgtacttcaatgacaactgctggctgagtgtggaaacccatttgctttacataatccatggacctgtcatggcggcacttgtggtcaatttcttctttttgctcaacattgtccgggtgcttgtgaccaaaatgagggaaacccatgaggcggaatcccacatgtacctgaaggctgtgaaggccaccatgatccttgtgcccctgctgggaatccagtttgtcgtctttccctggagaccttccaacaagatgcttgggaagatatatgattacgtgatgcactctctgattcatttccagggcttctttgttgcgaccatctactgcttctgcaacaatgaggtccaaaccaccgtgaagcgccaatgggcccaattcaaaattcagtggaaccagcgttgggggaggcgcccctccaaccgctctgctcgcgctgcagccgctgctgcggaggctggcgacatcccaatttacatctgccatcaggagctgaggaatgaaccagccaacaaccaaggcgaggagagtgctgagatcatccctttgaatatcatagagcaagagtcatctgcttgaatgtgaagcaaacacagcatcgtgatcactgag

SEQ ID NO: 7537 - DNA, 2617 bp, Homo sapiens
ataacgtctttgtcactaaaatgttccccaggggccttcggcgagtctttttgtttggttttttgtttttaatctgtggctcttgataatttatctagtggttgcctacacctgaaaaacaagacacagtgtttaactatcaacgaaagaactggacggctccccgccgcagtcccactccccgagtttgtggctggcatttgggccacgccgggctgggcggtcacagcgaggggcgcgcagtttggggtcacacagctccgcttctaggccccaaccaccgttaaaaggggaagcccgtgccccatcaggtccgctcttgctgagcccagagccatcccgcgctctgcgggctgggaggcccgggccaggacgcgagtcctgcgcagccgaggttccccagcgccccctgcagccgcgcgtaggcagagacggagcccggccctgcgcctccgcaccacgcccgggaccccacccagcggcccgtacccggagaagcagcgcgagcacccgaagctcccggctggcggcagaaaccgggagtggggccgggcgagtgcgcggcatcccaggccggcccgaacgctccgcccgcggtgggccgacttcccctcctcttccctctctccttcctttagcccgctggcgccggacacgctgcgcctcatctcttggggcgttcttccccgttggccaaccgtcgcatcccgtgcaactttggggtagtggccgtttagtgttgaatgttccccaccgagagcgcatggcttgggaagcgaggcgcgaacccggcccccgaagggccgccgtccgggagacggtgatgctgttgctgtgcctgggggtcccgaccggccgcccctacaacgtggacactgagagcgcgctgctttaccagggcccccacaacacgctgttcggctactcggtcgtgctgcacagccacggggcgaaccgatggctcctagtgggtgcgcccactgccaactggctcgccaacgcttcagtgatcaatcccggggcgatttacagatgcaggatcggaaagaatcccggccagacgtgcgaacagctccagctgggtagccctaatggagaaccttgtggaaagacttgtttggaagagagagacaatcagtggttgggggtcacactttccagacagccaggagaaaatggatccatcgtgacttgtgggcatagatggaaaaatatattttacataaagaatgaaaataagctccccactggtggttgctatggagtgccccctgatttacgaacagaactgagtaaaagaatagctccgtgttatcaagattatgtgaaaaaatttggagaaaattttgcatcatgtcaagctggaatatccagtttttacacaaaggatttaattgtgatgggggccccaggatcatcttactggactggctctctttttgtctacaatataactacaaataaatacaaggcttttttagacaaacaaaatcaagtaaaatttggaagttatttaggatattcagtcggagctggtcattttcggagccagcatactaccgaagtagtcggaggagctcctcaacatgagcagattggtaaggcatatatattcagcattgatgaaaaagaactaaatatcttacatgaaatgaaaggtaaaaagcttggatcgtactttggagcttctgtctgtgctgtggacctcaatgcagatggcttctcagatctgctcgtgggagcacccatgcagagcaccatcagagaggaaggaagagtgtttgtgtacatcaactctggctcgggagcagtaatgaatgcaatggaaacaaacctcgttggaagtgacaaatatgctgcaagatttggggaatctatagttaatcttggcgacattgacaatgatggctttgaagatgttgctatcggagctccacaagaagatgacttgcaaggtgctatttatatttacaatggccgtgcagatgggatctcgtcaaccttctcacagagaattgaaggacttcagatcagcaaatcgttaagtatgtttggacagtctatatcaggacaaattgatgcagataataatggctatgtagatgtagcagttggtgcttttcggtctgattctgctgtcttgctaaggacaagacctgtagtaattgttgacgcttctttaagccaccctgagtcagtaaatagaacgaaatttgactgtgttgaaaatggatggccttctgtgtgcatagatctaacactttgtttctcatataagggcaaggaagttccaggttacattgttttgttttataacatgagtttggatgtgaacagaaaggcagagtctccaccaagattctatttctcttctaatggaacttctgacgtgattacaggaagcatacaggtgtccagcagagaagctaactgtagaacacatcaagcatttatgcggaaagatgtgcgggacatcctcaccccaattcagattgaagctgcttaccaccttggtcctcatgtcatcagtaaacgaagtacagaggaattcccaccacttcagccaattcttcagcagaagaaagaaaaagacataatgaaaaaaacaaagaagtga

SEQ ID NO: 7538 - DNA, 435 bp, Homo sapiens
cctccatcaggctgcccttctctggcttcctcctgatccaagttctctacattcatctctctgcctccaggactgatcatgagccatcagctcctctggggccagctataggacaacagaactctcaccaaaggaccagacacagtgggcaccatgggacagtgtcggtcagccaacgcagaggatgctcaggaattcagtgatgtggagagggccattgagaccctcatcaagaactttcaccagtactccgtggagggtgggaaggagacgctgaccccttctgagctacgggacctggtcacccagcagctgccccatctcatgccgagcaactgtggcctggaagagaaaattgccaacctgggcagctgcaatgactctaaactggagttcaggagtttctgggagctgattggagaagcggccaagagt

SEQ ID NO: 7539 - DNA, 976 bp, Homo sapiens
agagaactacattcctcctaggggaaacaggagaatcaaataggaacggagatacagagtggggaatagagaagtcaaatggagaataagagggagtgataactgaataggggtagtaagaagaaaaagggagctacattgaggagaatggaaagttgaaagtaggtatggaggggaggagactgacaggcaggaacggagacccccctctggaggcggaaagaggcaggaccacttccggccagggagggggataggctcagacacaaggagaggcttggagagagcagacgccttctggattcaagaagacgaggctcacctgttactcggcctcccagaaagatggataggagaaatgactacggatatagggtgcctctatttcaggtgaggcctctctgcattctctctaggccatctgccccatcctgagttcacttactgctcttcagaccccttccaccgtgtagtttcataattccctgcctaactcgtctcagtcctcccttacatggtgaaggagaggagaggaaaacctgcctgactctattccttccttgctccctaccccattttaattaaccactgctcagaggaagggaaggcctttgtggaaagggatgggctttagcgaggccaaatggcccagaggatggtaatcctaagtgtgtagggccctctgcctcccccggggagcctggggcttcccttccctccagatatacagactgagaccacagaagaggacagtgtcctgctgatgcataccctgttggcggcaaccaaggactccctggccatggacccaccagttgtcaaccggcctaagaaaagcaagaccaagaaggcccctataaagactattactaaggctgcacctgctgcccctccagtcccagctgccaatgagattgccaccaacaagcccaaaataacttggcaggctttaaacctgccagtcattacccagatc

SEQ ID NO: 7540 - DNA, 2128 bp, Homo sapiens
cactcagtcctggtggggtcgcacgtaacggtcctgagctatgcataagccgtttgaccacgcatggagaattttaccacccagagacacgcgagtggccctgtgcaagtttcaactgcgcggggggcggggaattccgcagacaggattctagaatttatgtcttgtgtggtaacatttcagccggtgggtggcggggattaggcgtgaagcggttcagcaggcagaggttctcggacgccctccggcgaagccacctgttgatgcttttgactttctgtccttgttcctcgtcccatctggagcatttccaattctggttttgcggagcagcaggtctgagcttgtccggcgagggtgggagttggtcccggcggagatccagtgggaagagccggcggctgcccgggcaactcccccactggaaaggattctgaaagaaatgaagtcagccctcagaaatgaagttgactgcctgctggctttctgttgactggcccggagctgtactgcaagacccttgtgagcttccctagtctaagagtaggatgtctgctgaagtcatccatcaggttgaagaagcacttgatacagatgagaaggagatgctgctctttttgtgccgggatgttgctatagatgtggttccacctaatgtcagggaccttctggatattttacgggaaagaggtaagctgtctgtcggggacttggctgaactgctctacagagtgaggcgatttgacctgctcaaacgtatcttgaagatggacagaaaagctgtggagacccacctgctcaggaaccctcaccttgtttcggactatagagtgctgatggcagagattggtgaggatttggataaatctgatgtgtcctcattaattttcctcatgaaggattacatgggccgaggcaagataagcaaggagaagagtttcttggaccttgtggttgagttggagaaactaaatctggttgccccagatcaactggatttattagaaaaatgcctaaagaacatccacagaatagacctgaagacaaaaatccagaagtacaagcagtctgttcaaggagcagggacaagttacaggaatgttctccaagcagcaatccaaaagagtctcaaggatccttcaaataacttcaggctccataatgggagaagtaaagaacaaagacttaaggaacagcttggcgctcaacaagaaccagtgaagaaatccattcaggaatcagaagcttttttgcctcagagcatacctgaagagagatacaagatgaagagcaagcccctaggaatctgcctgataatcgattgcattggcaatgagacagagcttcttcgagacaccttcacttccctgggctatgaagtccagaaattcttgcatctcagtatgcatggtatatcccagattcttggccaatttgcctgtatgcccgagcaccgagactacgacagctttgtgtgtgtcctggtgagccgaggaggctcccagagtgtgtatggtgtggatcagactcactcagggctccccctgcatcacatcaggaggatgttcatgggagattcatgcccttatctagcagggaagccaaagatgttttttattcagaactatgtggtgtcagagggccagctggaggacagcagcctcttggaggtggatgggccagcgatgaagaatgtggaattcaaggctcagaagcgagggctgtgcacagttcaccgagaagctgacttcttctggagcctgtgtactgcggacatgtccctgctggagcagtctcacagctcaccatccctgtacctgcagtgcctctcccagaaactgagacaagaaagaaaacgcccactcctggatcttcacattgaactcaatggctacatgtatgattggaacagcagagtttctgccaaggagaaatattatgtctggctgcagcacactctgagaaagaaacttatcctctcctacacataagaaaccaaaaggctgggcgtagtggctcacacctgtaatcccagcactttgggaggccaaggagggcagatcacttcaggtcaggagttcgagaccagcctggccaacatggtaaacgctgtccctagtaaaaatac

SEQ ID NO: 7541 - DNA, 797 bp, Homo sapiens
ccctggcagagatctgcaggtgaatggacaccaccctcctggggccacgtggggtcctttgtcccagcccgaccaaccctccaggctggacagcgagctactgaccttcagcctctcccggcatcgctcctggtggcgtgagcgctggccaggctgtctgcatgaggaggtgccagcagtgggcctcggggccccccatggccaggccctggtgtcaggtgctggctgtgccctggagcccagctatgtggaggccctacacagttgcctgcagatcctgatcgcgcttctgggctttgtctgtggctgccaggtggtcagcgtgtttacggaggaagaggacagctttgatttcattggtggatttgatccatttcctctctaccatgtcaatgaaaagccatccagtctcttgtccaagcaggtgtacttgcctgcgtaagtgaggaaacagctgatcctgctcctgtggcctccagcctcagcgaccgaccagtgacaatgacaggagctcccaggccttgggacgcgcccccacccagcaccccccaggcggccggcagcacctgccctgggttctaagtactggacaccagccagggcggcagggcagtgccacggctggctgcagcgtcaagagagtttgtaatttcctttctcttaaaaaaaaaaaagaaaagaaaacatacaaaagaaaaggcaaaaccccacatgcccacctcctctggcaacatgggggtcacagctctgcccccaggctgtcgtctcgtcgaggagcccctccctcaggtgcccac

SEQ ID NO: 7542 - DNA, 1286 bp, Homo sapiens
caattatccacgggagactcggttttcctctctgtaaattacggatattaggaatacttgccgcctggggttgttttgagcactttcattgtttaggtgctgtatttattgggtgtgcgttccctgggagagcccgagggagacggctcctgcaccggccccaagggcctctctgcccgtggagtgcaggagcgaaggggctggcctagctgaccaccagggcccctgctggctctgaccgccctcctatcccaagtaattatttacacgtttcgcgttcgcttatgtattatgtgtaatcatggcacagtatcctgaagccgtcggagtctgtgtgctggtgcaaggtctgggacaaatttaagaagagagagaacctaaattggtaataaatcaataagaaatatttacattcactcagtgaaaagtgtcatgtctgagctcagcatatatcggagccacacatggacacctctccttcctccactaagagcggaaaatgaacaaatcccaggaacaagtgtcattcaaggatgtatgtgtggacttcactcaggaagagtggtatctgctggaccctgctcagaagattctatacagagatgtgatcctggaaaattatagcaatcttgtctcagtagggtattgcattactaaaccagaagtgatctttaagatcgagcaaggagaagagccctggatattagaaaaaggattcccaagccagtgccacccagaaaggaaatggaaagttgatgacgtgttagagagcagccaggaaaatgaagatgaccatttttgggagcttctattccacaacaacaaaacatggaatctgaagcttataaaagttgaatgacagcagcattaaacatatatgtgaagagtccccgatgtttgtagaccttatgtgagtatgcaaatatataaatttgagtatgcttgatttgtatattggaactcaacatgatcataaggagaagatacgtacccttaattgagtaactactatggtatttgttaatattttctacactaaataccattggtgtctttataggttgacataattatatatgtgtatgtacatatgtttgtgtgtatatgtaaatatatttctacacacatacttaaatatagtgatgtgctagtataacctcatactgacttaaaagttctgattgttaaattttaaggaattttgtgagccagttattaaaagcagtcattatttaaaatatgtaaacttacagttaaaaacaaaggtaataaatactcagcactca

SEQ ID NO: 7543 - DNA, 547 bp, Homo sapiens
gagaggggtcgggcactcagaggatgctctgaccttgaaagggtcctatctggagacgagggagtagaacgtgctgaatgtgtgcggttcagggagcatttggtaaccctgcatttgggagcagtgggcagtaacaggttttggagaggtggacagataaggactgtgatcagcgcccgggtccaagagggcgggtacctggacgtctgggtgcctcaccctctccccgaacccttcccacagccgtacccgtgcgcagaggacgaggagtgcggcactgatgagtactgcgctagtcccacccgcggaggggacgcaggcgtgcaaatctgtctcgcctgcaggaagcgccgaaaacgctgcatgcgtcacgctatgtgctgccccgggaattactgcaaaaatggaatatgtgtgtcttctgatcaaaatcatttccgaggagaaattgaggaaaccatcactgaaagctttggtaatgatcatagcaccttggatgggtattccagaagaaccaccttgtcttcaaaaatgtatcacaccaaag

SEQ ID NO: 7544 - DNA, 947 bp, Homo sapiens
agcatgggagccgtctgtatgttgaattagggctcgcactcttgcgcaacacgtcaccagtcggaaactgggggtttgcttctgtgatttatttcattattgtgctgtgctgctggctctggtttaaagcaagcgtttgcaggccatcgaagacggcaatttggaggaaatggaagaggaagtacggcttaagaagcgaaaaagacgaagaaatgtggataaagatcctgcaaaagaagatgtggaaaaagctaagaagagaagaggccgccctcccgctgagaaactgtcaccaaatccccccaaactgacaaagcagatgaacgctatcatcgatactgtgataaactacaaagataggtgtaacgtggagaaggtgcccagtaattctcagttggaaatagaaggaaacagttcagggcgacagctcagtgaagtcttcattcagttaccttcaaggaaagaattaccagaatactatgaattaattaggaagccagtggatttcaaaaaaataaaggaaaggattcgtaatcataagtaccggagcctaggcgacctggagaaggatgtcatgcttctctgtcacaacgctcagacgttcaacctggagggatcccagatctatgaagactccatcgtcttacagtcagtgtttaagagtgcccggcagaaaattgccaaagaggaagagagtgaggatgaaagcaatgaagaggaggaagaggaagatgaagaagagtcagagtccgaggcaaaatcagtcaaggtgaaaattaagctcaataaaaaagatgacaaaggccgggacaaagggaaaggcaagaaaaggccaaatcgaggaaaagccaaacctgtagtgagcgattttgacagcgatgaggagcaggatgaacgtgaacagtcagaaggaagtgggacggatgatgagtgatcagtatggacct

SEQ ID NO: 7545 - DNA, 5099 bp, Homo sapiens
aggatgcttttccatatttgggaaggaaattcctctttcagaatttggccaaaacctctcctgcagtaattctatgaatctctctccctgcacctggaaggtttcttccctatcactcagttaagcaaacagaggcttttaaggatacagactcacaaattcttaaaatccaaaacaagatcccatgcttccttttaagaaattcaggcctgattcctactctcctcccagcttaaggccttctttagaatgaaagaataaattgcatctgcttctcccgttcccagcctgtccacccatctgcccattctctgtgagtgggtgtctgagcctctgctcaccttttcctctacaggctgtctatttgaccgcaggctctgctctcacctggaagtctgtattcagggtgagtgaggcccaagcatagaactcacaagatcggggggagaggggcaataaaaaacaagaaggggagagaaggcccagaaaggaagagggctactgggcttgagaagaaggaagacttgcctggaggaggagaggtaggggagaaagtgaagagagtacagtccatttgcaacctggactttggaaggcctcttattcaagccccctgctgacaccacttttgtgcccttagatggcttgtttgggcagtgccaggtgggagtggggcaggcccggccccttttgcaagtcacctccccagttctccaacgcttacaaggtgtgctccgacaactcatgtcccaaggattgtcctggcacgatgacctcacccagtatgtgatctctcaggagatggagcgcatccccaggcttcgccccccagagccccgtccaagggacaggtctggcttggcacccaagagacctggtcctgctggagagctgcttttacaggacatccccactggctccgcccctgctgcccagcatcggcttccacaaccaccagtgggcaaaggtggagctggggccagctcctctctgtcccctctgcaggctgagctgctcccgcctctcttggagcacctgctgctgcccccacagcctccccacccttcactgagttacgaacctgccttgctgcagccctacctgttccaccagtttggctcccgtgatggctccagggtctcagagggctccccagggatggtcagtgtcggccccctgcccaaggctgaagcccctgccctcttcagcagaactgcctccaagggcatatttggggaccaccctggccactcctacggggaccttccagggccttcacctgcccagctttttcaagactctgggctgctctatctggcccaggagttgccagcacccagcagggccagggtgccaaggctgccagagcaagggagcagcagccgggcagaggactccccagagggctatgagaaggaaggactaggggatcgtggagagaagcctgcttccccagctgtgcagccagatgcggctctgcagaggctggccgctgtgctggcgggctatggggtagagctgcgtcagctgacccctgagcagctctccacactcctgaccctgctgcagctactgcccaagggtgcaggaagaaatccgggaggggttgtaaatgttggagctgatatcaagaaaacaatggaggggccggtggagggcagagacacagcagagcttccagcccgcacatcccccatgcctggacaccccactgccagccctacctccagtgaagtccagcaggtgccaagccctgtctcctctgagcctcccaaagctgccagaccccctgtgacacctgtcctgctagagaagaaaagcccactgggccagagccagcccacggtggcaggacagccctcagcccgcccagcagcagaggaatatggctacatcgtcactgatcagaagcccctgagcctggctgcaggagtgaagctgctggagatcctggctgagcatgtgcacatgtcctcaggcagcttcatcaacatcagtgtggtgggaccagccctcaccttccgcatccggcacaatgagcagaacctgtctttggctgatgtgacccaacaagcagggctggtgaagtctgaactggaagcacagacagggctccaaatcttgcagacaggagtgggacagagggaggaggcagctgcagtccttccccaaactgcgcacagcacctcacccatgcgctcagtgctgctcactctggtggccctggcaggtgtggctgggctgctggtggctctggctgtggctctgtgtgtgcggcagcatgcgcggcagcaagacaaggagcgcctggcagccctggggcctgagggggcccatggtgacactacctttgagtaccaggacctgtgccgccagcacatggccacgaagtccttgttcaaccgggcagagggtccaccggagccttcacgggtgagcagtgtgtcctcccagttcagcgacgcagcccaggccagccccagctcccacagcagcaccccgtcctggtgcgaggagccggcccaagccaacatggacatctccacgggacacatgattctggcatacatggaggatcacctgcggaaccgggaccgccttgccaaggagtggcaggccctctgtgcctaccaagcagagccaaacacctgtgccaccgcgcagggggagggcaacatcaaaaagaaccggcatcctgacttcctgccctatgaccatgcccgcataaaactgaaggtggagagcagcccttctcggagcgattacatcaacgccagccccattattgagcatgaccctcggatgccagcctacatagccacgcagggcccgctgtcccataccatcgcagacttctggcagatggtgtgggagagcggctgcaccgtcatcgtcatgctgaccccgctggtggaggatggtgtcaagcagtgtgaccgctactggccagatgagggtgcctccctctaccacgtatatgaggtcagcagggccccacagcaaggggacaatggatgtgggaagagtagatgatggccttttcgtaacgttttcttcaccaaatgagcactcaacagtctttttaaaaaggcttttattggccctgctcatgattcatacatatatgaatatatataaacacatatatgcatacccatatattcacatatatacatgtgtgtgtcctgtttacagaacatacatgtgtgtgtgtgtgtgtgtgtgtgtgtgtcctgtctagagtcaaaaagcgttcatagagacttatgataaaggcacagagatcaaactataaaaccaccaaaaccgaggtaagaagctaacagctaagtgtatattagacagggaagataaggatacccaaagactgagattaagacctacgttaattgaacctaatttagctctgagtttcctggtggccaaagcaaagaaagacataccacccgttacatacgttactaatgtaaaagagaaacaaactttttcattaggagagagactaggtggaggggtggagaaggagggggaactgggcagaggccaagcaggggaaagagaaatatttcagacaaatgggagaacgtgagtccccactaagacaaaaaaaccttaagaacacagcagaagcttctcatcaccagatgagcctgaatagtaattttttccccaccaaataagcacatgacggtttttttaaaaagcctttcattggtcctgctggtggttaacgaaaaaaatccagtaagaatactacagaatttcatccaagtttatggcacgtgtagcaccgatactctggtagaccctgcgaggaagagggaggagaaactccgacctcgagaggctcacaatagctgtgtctgggtggaaaagctactagtggtcctgagcagtagataagtgacaggcagccagggttcctgggaccgctggaacttagaatttgaaccggcctgggaggccgggcggtggttggagagaccgagaaggtcgcgaggagagcgcgcgcaacgcggggactggggcagcccgcggcgctcaggcctgggcccctgccgggcaggtgaacctggtgtcggagcacatctggtgcgaggactttctggtgcggagcttctacctgaagaacgtgcagacccaggagacgcgcacgctcacgcagttccacttcctcagctggccggcagagggcacaccggcctccacgcggcccctgctggacttccgcaggaaggtgaacaagtgctaccggggccgctcctgccccatcatcgtgcactgcagtgatggtgcggggaggaccggcacctacatcctcatcgacatggtcctgaaccgcatggcaaaaggagtgaaggagattgacatcgctgccaccctggagcatgtccgtgaccagcggcctggccttgtccgctctaaggaccagtttgaatttgccctgacagccgtggcggaggaagtgaatgccatcctcaaggccctgccccagtgagaccctggggccccttggcgggcagcccagcctctgtccctctttgcctgtgtgagcatctctgtgtacccactcctcactgccccaccagccacctcttgggcatgctcagcccttcctagaagagtcaggaagggaaagccagaaggggcacgcctgcccagcctcgcatgccagagcctggggcatcccagagcccagggcatcccatgggggtgctgcagccaggaggagaggaaaggacatgggtagcaattctacccagagccttctcctgcctacattccctggcctggctctcctgtagctctcctggggttctgggagttccctgaacatctgtgtgtgtccccctatgctccagtatggaagaatggggtggagggtcgccacacccggctccccctgcttctcagccccgggcctgcctctgactcacacttgggcgctctgccctccctggcctcacgcccagcctcctcccaccaccctcccaccatgcgctgctcaacctctctccttctggcgcaagagaacatttctagaaaaaactacttttgtaccagtgtgaataaagttagtgtgttgtctgtgcagctgc

SEQ ID NO: 7546 - DNA, 641 bp, Homo sapiens
gcagcagaggctgttgccactggtgctaaagaggtgaaacaagatgctgacaaaagtgcagctgttgcgactgttgttgctgccgttgatatggccagagtgagagaaccagtgatcagcgctgtagagcagactgctcagaggacaaccacgactgctgtgcacatccaacctgctcaagaacaggtaagaaaggaagcggagaagactgctgtaactaaggtagtagtggccgccgataaagccaaggaacaagaattaaaatcaagaaccaaagaagtaattaccacaaagcaagagcagatgcacgtaactcatgagcagataagaaaagaaactgaaaaaacatttgtaccaaaggtagtaatttccgcagctaaagccaaagaacaagaaactagaatttctgaagaaattactaagaaacagaaacaagtaactcaagaagcaatgagaaaggaagccgagaaaactgccttgtctacaatagcagttgctactgctaaagccaaagaacaagaaacaatactgagaactagagaaactatggctactagacaagaacaaatccaagttacccatggaaaggtggacgttggaaaaaaggctgaagctgtagcaacagttgttgctgcagtaga

SEQ ID NO: 7547 - DNA, 553 bp, Homo sapiens
cggtgcccgccgtggacttcggcaacgcgcaggaggcgtaccgcagccggcgaacctgggagctggcgcggagcctgctggtgctgcgcttgtgcgcctggcccgcgctgctggcgcgccacgagcaggtcctgcacctcagctgcggagagggatggcagtggcacgaataagcgggacaagcaataccaggcccactgggccttcggggaccgcaggaatggtgtcatcagtgcccgcacctacttctacgccaatgaggccaagtgcgacagccacatggagacattcttgcgctgcatcgaagcctcagctgcagttctcagaggtgctggccaagtggaggtgcttctttcaccaaatggctgtggagcaagggcaggcgggcctggctgccatggacaccaagctggaggtggcggtgctgcaggaaagtgtcgcaaagttgggcatcgcatccagggctgagattgaggactggttcacggcagagaccctgggagtgtctggcaccatggacctgctggactggagcagcctcatcgacagcagg

SEQ ID NO: 7548 - DNA, 568 bp, Homo sapiens
ggggagctgtggctcagacctctggtttctgcgcctcctcactctccaaacccaacctcgaggttcccccgccgctgcgcaccctgggaagccctttctcaccaggagctctcaccccaatatcattctctccctcctcctccaactcctccgagcccaggtccgacatggtctcgccccagcctggatcacagccgcagcgcctctagcagctttatagaattgagagattgctgagcctaaatacatgttgctgcattgcctccgagaatggccggacctatccccactctcaccaaaacagagtgtgggactcactgctccctcgcctactagagcagagccactgccagaaggaaggggacaagacccagcaggacaccttctttccacgctttccagcctgtgggagcggcaggggcaacagagagaggatctggagccaggattaatgactcatttatgaagcatcttattctgcgaccgaggctcagtggtcagtggcgacgtaaatggctcgactccccgctggcattcgcttcatcatctcattctccagggatcagtg

SEQ ID NO: 7549 - DNA, 2876 bp, Homo sapiens
agtgcgtgtgctggggcgagcgggagcgggcgaggatgggcacaggatagaggcagagccacccacgccgccgcggccccacgctgggcgacagagcctccagttccccttcaatggtggcgggtcgccggagctctgatcgccgggaacccttgccgctgctgtcctgcgaccccaagcaggtatagacacgtgtggccgtttacgctgtaggatcctcattcccactggctttgaacattttggggacttacaatgccgccacccgcggacatcgtcaaggtggccatagaatggccgggcgcctaccccaaactcatggaaattgatcagaaaaaaccactgtctgcaataataaaggaagtctgtgatgggtggtctcttgccaaccatgaatattttgcactccagcatgccgatagttcaaacttctatatcacagaaaagaaccgcaatgagataaaaaatggcactatccttcgattaaccacatctccagtaagttgatcttagcttctgacttccagcaaactctttgctctgcgtttctgctatatgtgattgtgggatattaatttttgaggttgactttagtgcaaagcaaaaggcttccagaatgtcctgacatgcagattctggattagcaggaatgcccctccgtagatttcccactgcagaggaggaagaccttattccaggcgaagggcaagcttgtctaacctgcggcccaggatagctttgaattcacaaattcgtaaactttctcaaaacattatgagttgttctgtattttatttagttcatcagctatcgttagcgtattttatgtgtggcccaagacattcttcttcttcctgtggcccagggaagccaaaagattggacacttctgctttaagatttgagtttggaggtcatcttaacaacttctgtgttacagctgggatcactcacctgtaccaattggttttacccacctactcacacatccacctaatgccatctgagcaaattcagacaacaaacaaagcaaacaaaaccaaagtcagttactttcctttaaagtcggttactttcctttaaagtcagtgtggctgggcgcggtggctcatgcctgtaatcccagcactttgggaggccgaggcaggtggatcaggaggtcaggagatcaagaccatcttggctaacacagtgaaaccctgtctctactaaaaatacaaaaaattagccgggcgtggtggtggacgcctgtagtcccagctactcgggaggctaaggcaggagaatggcgtgaaacctaataggtggagcttgcagtgagcagaggtagtgccactgcactccagcctgggtgagagagtgagactccatctcaaaaaaaaaaagaaaaaaaagaaaaagtcagtgtgtgtgtgtgtgtgtgtgtctgtgtgtgtgtgtgtgtgtgtgagagagagagagagtttaagtattttgtagctttaatgggttattatgacaattcataaaaataatttagaaatattgaccacttcactgatccattgacagctgattctacataagaactttagagtcttctgaattaaagctgctaaacaagacgctacagtatatttagactattgtagctgatgatgtctctcttcttggtctttcctacttgcttggagatactttaggtagtaacattagcatatttaactatattattttacagtgcatttcattgctttcctaaaaaattatctgccccaaatacaccaagtgttactattttcactctgcatatgtgatgaaaactgtgtctaactatcattttcagtttccactgaagccatgtggtagactaaaaataaatttaaaaattgggaaaagcatctggctaaaattaagctgtgggtactgtaactaccataaatccttattgttgaaaattacattagtgtggcttagaaactcctaaacattttgcccaataacatcctgaacctaaaaacagtgatgagctcaatggagtgagttgctacagttggctgaactgtctttgatgcctgctttgctacttaatggagattataatctactcatttttcagtggctacatgatgagctgaggcgttttcgtctgactttgcattggtcttcttactcaagtcagcatgaatgaatgttaatttgacctttacaccattgttttatgtgttttttgtagtttctgattatcctgctaaaagtcatcatctgcttgctggacagaaaaagtagaccttgccttttatttcattttagagtctaaaagacagctttttaatcaaagccttctctaagccaaagaaggagttagtttcatttttttactgctgtggatttatgaacaaaaattccgcaatctaagtcactccttgagagaaggcttagatgttaggcagagtgaagtttttcagcatcccaaaagaaacttagcgtgacttgtcatcaggaagaatggaatttgtgttcttgagataatgatcctcacattcccagctcagtgaatggaaagatgtgaaagccagtgtaagaggcactattaaaagatgggagcagccgggtgcagtggctcacgcctgtaatcccagcactttgggaggccgaggcaggcggatcaccaggtcaggagatcaagaccatcctggctaacacggtgtaaaccccgtctctactaaaaatacaaaaaaaattagccaggcgtggtggcaggcgcctgtagtcccagctactcgggaggctgacgcaggagaatggcgtgaacccaggaggtggagcttacagtgagcagagatgacgccactgcactccagcctgggcaacagagtgagactatgtctctgtctc

SEQ ID NO: 7550 - DNA, 4182 bp, Homo sapiens
cgcgcgggcgcgggggacggcgcaggggccgcctggctggagcagccagaggggatagcttcgtcgagaacggaggacaccggcggtccagggtcctgggcagtcgcgccagagctgagcggagggcgcggcgcgagaacgaatctttgtgacattctctctcagcattctttatcccctgtttgctgaagacttcgacaaaagctggtcttagctgttggcattctcctgagaaaaggatagcttcagaaatcagaaaaacatttgggaggtgtctagcccagtggaccttctgaagagcaatgctaagaagacgtttggtttaaagaattaaaaggaagaacaacttaagagcttcttcaaagtttcccgcatgaaaattacttaaacgttgcacacaacgtttcacaaaatcttttgtgaaagaagaaaaggaaattcagtgtgtgagtctcagcaggagttaagctaatgcagcttaaaataatgccgaaaaagaagcgcttatctgcgggcagagtgcccctgattctcttcctgtgccagatgattagtgcactggaagtacctcttgatcaaaaatctactgaagtaatggtacagcctccaaccatcacccaacagtctccaaaagattacattattgaccctcgggagaatattgtaatccagtgtgaagccaaagggaaaccgcccccaagcttttcctggacccgtaatgggactcattttgacatcgataaagaccctctggtcaccatgaagcctggcacaggaacgctcataattaacatcatgagcgaagggaaagctgagacctatgaaggagtctatcagtgtacagcaaggaacgaacgcggagctgcagtttctaataacattgttgtccgcccatccagatcaccattgtggaccaaagaaaaacttgaaccaatcacacttcaaagtggtcagtctttagtacttccctgcagacccccaattggattaccaccacctataatattttggatggataattcctttcaaagacttccacaaagtgagagagtttctcaaggtttgaatggggacctttatttttccaatgtcctcccagaggacacccgcgaagactatatctgttatgctagatttaatcatactcaaaccatacagcagaagcaacctatttctgtgaaggtgatttcagtggatgaattgaatgacactatagctgctaatttgagtgacactgagttttatggtgctaaatcaagtagagagaggccaccaacatttttaactccagaaggcaatgcaagtaacaaagaggaattaagaggaaatgtgctttcactggagtgcattgcagaaggactgcctaccccaattatttactgggcaaaggaagatggaatgctacccaaaaacaggacagtttataagaactttgagaaaaccttgcagatcattcatgtttcagaagcagactctggaaattaccaatgtatagcaaaaaacgcattaggagccatccaccataccatttctgttagagttaaagcggctccatactggatcacagcccctcaaaatcttgtgctgtccccaggagaggatgggaccttgatctgcagagctaatggcaaccccaaacccagaattagctggttaacaaatggagtcccaatagaaattgcccctgatgaccccagcagaaaaatagatggcgataccattattttttcaaatgttcaagaaagatcaagtgcagtctatcagtgcaatgcctctaatgaatatggatatttactggcaaacgcatttgtaaatgtgctggctgagccaccacgaatcctcacacctgcaaacacactctaccaggtcattgcaaacaggcctgctttactagactgtgccttctttgggtctcctctcccaaccatcgagtggtttaaaggagctaaaggaagtgctcttcatgaagatatttatgttttacatgaaaatggaactttggaaattcctgtggcccaaaaggacagtacaggaacttatacgtgtgttgcaaggaataaattagggatggcgaagaatgaagttcacttagaaatcaaagatcctacatggatcgttaaacagcccgaatatgcagttgtgcaaagagggagcatggtgtcctttgaatgcaaagtgaaacatgatcacaccttatccctcactgtcctgtggctgaaggacaacagggaactgcccagtgatgaaaggttcactgttgacaaggatcatctagtggtagctgatgtcagtgacgatgacagcgggacctacacgtgtgtggccaacaccactctggacagcgtctccgccagcgctgtgcttagcgttgttgctcctactccaactccagctcccgtttacgatgtcccaaatcctccctttgacttagaactgacagatcaacttgacaaaagtgttcagctgtcatggaccccaggcgatgacaacaatagccccattacaaaattcatcatcgaatatgaagatgcaatgcacaagccagggctgtggcaccaccaaactgaagtttctggaacacagaccacagcccagctgaagctgtctccttacgtgaactactccttccgcgtgatggcagtgaacagcattgggaagagcttgcccagcgaggcgtctgagcagtatttgacgaaagcctcagaaccagataaaaaccccacagctgtggaaggactgggatcagagcctgataatttggtgattacgtggaagcccttgaatggtttcgaatctaatgggccaggccttcagtacaaagttagctggcgccagaaagatggtgatgatgaatggacatctgtggttgtggcaaatgtatccaaatatattgtctcaggcacgccaacctttgttccatacctgatcaaagttcaggccctgaatgacatggggtttgcccccgagccagctgtagtcatgggacattctggagaagacctcccaatggtggctcctgggaacgtgcgtgtgaatgtggtgaacagtaccttagccgaggtgcactgggacccagtacctctgaaaagcatccgaggacacctacaaggctatcggatttactattggaagacccagagttcatctaaaagaaacagacgtcacattgagaaaaagatcctcaccttccaaggcagcaagactcatggcatgttgccggggctagagccctttagccactacacactgaatgtccgagtggtcaatgggaaaggggagggcccagccagccctgacagagtctttaatactccagaaggagtccccagtgctccctcgtctttgaagattgtgaatccaacactggactctctcactttggaatgggatccaccgagccacccgaatggcattttgacagagtacaccttaaagtatcagccaattaacagcacacatgaattaggccctctggtagatttgaaaattcctgccaacaagacacggtggactttaaaaaatttaaatttcagcactcgatataagttttatttctatgcacaaacatcagcaggatcaggaagtcaaattacagaggaagcagtaacaactgtggatgaagctggtattcttccacctgatgtaggtgcaggcaaagttcaagcagtaaatcccaggatcagcaatcttactgctgcagctgctgagacctatgccaatatcagttgggaatatgagggaccagagcatgtgaacttttatgttgaatatggtgtagcaggcagcaaagaagaatggagaaaagaaattgtaaatggttctcggagcttctttgggttaaagggtctaatgccaggaacagcatacaaagttcgagttggtgctgtgggggactctggttttgtgagttcagaggatgtgtttgagacaggcccagcgatggcaagccggcaggtggatattgcaactcagggctggttcattggtctgatgtgtgctgttgctctccttatcttaattttgctgattgtttgcttcatcagaagaaacaagggtggtaaatatccagttaaagaaaaggaagatgcccatgctgaccctgaaatccagcctatgaaggaagatgatgggacatttggagaatacaggctgttttcatttgtttcttctgcatccttttaa

SEQ ID NO: 7551 - DNA, 3345 bp, Homo sapiens; identical to SEQ ID NO: 519

SEQ ID NO: 7552 - DNA, 561 bp, Homo sapiens
atggcgggacacctggcttcggatttcgccttctcaccccctccaggcggtggaggtgatgggccaggggggccggagccgggctgggttgatcctcggacctggctaagcttccaaggccctcctggagggccaggaatcgggccggggtttgggccaggctctgaggagtgggggattcccccatgtcccccgccgtatgagttctgcggggggatggcgtactgtgggcctcagactggagtggggctagtgccccaagacggcttggagacctctcagcctgagggcgaagcaggagtcggggtggagagcaactccgatggggcctccccggagccctgcaccgtcccctctggtgccgtgaagctggagaaggagaagctggagcaaaacccggaggagtcccaggacatcaaagctctgcagaaagaactcgagcaatttgccaagctcctgaagcagaagaggatcaccctgggatatacacaggccgatgtggctcaccctgggggttctatttgggaaggtgttcagccaaacgaccatctgccgctttga

SEQ ID NO: 7553 - DNA, 4310 bp, Homo sapiens
ggccctgtaaccaagatactgactgaacatggctggcggactcaggctggggtctgcagtgcagcattaatgggccgctgacatgaatatggagtagttttctctagcaaagagtaatgtgggccatggagtcaggccacctcctctgggctctgctgttcatgcagtccttgtggcctcaactgactgatggagccactcgagtctactacctgggcatccgggatgtgcagtggaactatgctcccaagggaagaaatgtcatcacgaaccagcctctggacagtgacatagtggcttccagcttcttaaagtctgacaagaaccggatagggggaacctacaagaagaccatctataaagaatacaaggatgactcatacacagatgaagtggcccagcctgcctggttgggcttcctggggccagtgttgcaggctgaagtgggggatgtcattcttattcacctgaagaattttgccactcgtccctataccatccaccctcatggtgtcttctacgagaaggactctgaaggttccctatacccagatggctcctctgggccactgaaagctgatgactctgttcccccggggggcagccatatctacaactggaccattccagaaggccatgcacccaccgatgctgacccagcgtgcctcacctggatctaccattctcatgtagatgctccacgagacattgcaactggcctaattgggcctctcatcacctgtaaaagaggagccctggatgggaactcccctcctcaacgccaggatgtagaccatgatttcttcctcctcttcagtgtggtagatgagaacctcagctggcatctcaatgagaacattgccacttactgctcagatcctgcttcagtggacaaagaagatgagacatttcaggagagcaataggatgcatgcaatcaatggctttgtttttgggaatttacctgagctgaacatgtgtgcacagaaacgtgtggcctggcacttgtttggcatgggcaatgaaattgatgtccacacagcatttttccatggacagatgctgactacccgtggacaccacactgatgtggctaacatctttccagccacctttgtgactgctgagatggtgccctgggaacctggtacctggttaattagctgccaagtgaacagtcactttcgagatggcatgcaggcactctacaaggtcaagtcttgctccatggcccctcctgtggacctgctcacaggcaaagttcgacagtacttcattgaggcccatgagattcaatgggactatggcccgatggggcatgatgggagtactgggaagaatttgagagagccaggcagtatctcagataagtttttccagaagagctccagccgaattgggggcacttactggaaagtgcgatatgaagcctttcaagatgagacattccaagagaagatgcatttggaggaagataggcatcttggaatcctggggccagtgatccgggctgaggtgggtgacaccattcaggtggtcttctacaaccgtgcctcccagccattcagcatgcagccccatggggtcttttatgagaaagactatgaaggcactgtgtacaatgatggctcatcttaccctggcttggttgccaagccctttgagaaagtaacataccgctggacagtcccccctcatgccggtcccactgctcaggatcctgcttgtctcacttggatgtacttctctgctgcagatcccataagagacacaaattctggcctggtgggcccgctgctggtgtgcagggctggtgccttgggtgcagatggcaagcagaaaggggtggataaagaattctttcttctcttcactgtgttggatgagaacaagagctggtacagcaatgccaatcaagcagctgctatgttggatttccgactgctttcagaggatattgagggcttccaagactccaatcggatgcatgccattaatgggtttctgttctctaacctgcccaggctggacatgtgcaagggtgacacagtggcctggcacctgctcggcctgggcacagagactgatgtgcatggagtcatgttccagggcaacactgtgcagcttcagggcatgaggaagggtgcagctatgctctttcctcatacctttgtcatggccatcatgcagcctgacaaccttgggacatttgagatttattgccaggcaggcagccatcgagaagcagggatgagggcaatctataatgtctcccagtgtcctggccaccaagccacccctcgccaacgctaccaagctgcaagaatctactatatcatggcagaagaagtagagtgggactattgccctgaccggagctgggaacgggaatggcacaaccagtctgagaaggacagttatggttacattttcctgagcaacaaggatgggctcctgggttccagatacaagaaagctgtattcagggaatacactgatggtacattcaggatccctcggccaaggactggaccagaagaacacttgggaatcttgggtccacttatcaaaggtgaagttggtgatatcctgactgtggtattcaagaataatgccagccgcccctactctgtgcatgctcatggagtgctagaatctactactgtctggccactggctgctgagcctggtgaggtggtcacttatcagtggaacatcccagagaggtctggccctgggcccaatgactctgcttgtgtttcctggatctattattctgcagtggatcccatcaaggacatgtatagtggcctggtggggcccttggctatctgccaaaagggcatcctggagccccatggaggacggagtgacatggatcgggaatttgcattgttgttcttgatttttgatgaaaataagtcttggtatttggaggaaaatgtggcaacccatgggtcccaggatccaggcagtattaacctacaggatgaaactttcttggagagcaataaaatgcatgcaatcaatgggaaactctatgccaaccttaggggtcttaccatgtaccaaggagaacgagtggcctggtacatgctggccatgggccaagatgtggatctacacaccatccactttcatgcagagagcttcctctatcggaatggcgagaactaccgggcagatgtggtggatctgttcccagggacttttgaggttgtggagatggtggccagcaaccctgggacatggctgatgcactgccatgtgactgaccatgtccatgctggcatggagaccctcttcactgttttttctcgaacagaacacttaagccctctcaccgtcatcaccaaagagactgaaaaagtgccccccagagacattgaagaaggcaatgtgaagatgctgggcatgcagatccccataaagaatgttgagatgctggcctctgttttggttgccattagtgtcacccttctgctcgttgttctggctcttggtggagtggtttggtaccaacatcgacagagaaagctacgacgcaataggaggtccatcctggatgacagcttcaagcttctgtctttcaaacagtaacatctggagcctggagatatcctcaggaagcacatctgtagtgcactcccagcaggccatggactagtcactaaccccacactcaaaggggcatgggtggtggagaagcagaaggagcaatcaagcttatctggatatttctttctttatttattttacatggaaataatatgatttcactttttctttagtttctttgctctacgtgggcacctggcactaagggagtaccttattatcctacatcgcaaatttcaacagctacattatatttccttctgacacttggaaggtattgaaatttctagaaatgtatccttctcacaaagtagagaccaagagaaaaactcattgattgggtttctacttctttcaaggactcaggaaatttcactttgaactgaggccaagtgagctgttaagataacccacacttaaactaaaggctaagaatataggcttgatgggaaattgaaggtaggctgagtattgggaatccaaattgaattttgattctccttggcagtgaactactttgaagaagtggtcaatgggttgttgctgccatgagcatgtacaacctctggagctagaagctcctcaggaaagccagttctccaagttcttaacctgtggcactgaaaggaatgttgagttacctcttcatgttttagacagcaaaccctatccattaaagtacttgttagaaca

SEQ ID NO: 7554 - DNA, 2646 bp, Homo sapiens
atttatgtgggtttgtttgagggctgcattcctagtgaagtattccatcaaactgccattattcatcttgatgaaagcttgaggaactttagaaggagagaaacatccagaccacccggtttttggtttctaaatgacatgaagagaatacaatgttaataattcagcttagagaactatcaacacaggacaatgcaagcccatgagctgttccggtattttcgaatgccagagctggttgacttccgacagtacgtgcgtactcttccgaccaacacgcttatgggcttcggagcttttgcagcactcaccaccttctggtacgccacgagacccaaacccctgaagccgccatgcgacctctccatgcagtcagtggaagtggcgggtagtggtggtgcacgaagatccgcactacttgacagcgacgagcccttggtgtatttctatgatgatgtcacaacattatacgaaggtttccagaggggaatacaggtgtcaagatcgctcaggcccctctgtgtccactgtaactttcccagagtcggtcccaaagctcactggaccctctagatgttccctgtggccctgggggctccatggtcaaatatgtgagtgtcacatcctgtattttatgataatggcccttgtttaggctctcggaaaccagaccaaccctatgaatggctttcatataaacaggttgcagaattgtcggagtgcataggctcagcactgatccagaagggcttcaagactgccccagatcagttcattggcatctttgctcaaaatagacctgagtgggtgattattgaacaaggatgctttgcttattcgatggtgatcgttccactttatgatacccttggaaatgaagccatcacgtacatagtcaacaaagctgaactctctctggtttttgttgacaagccagagaaggccaaactcttattagagggtgtagaaaataagttaataccaggccttaaaatcatagttgtcatggatgcctacggcagtgaactggtggaacgaggccagaggtgtggggtggaagtcaccagcatgaaggcgatggaggacctgggaagagccaacagacggaagcccaagcctccagcacctgaagatcttgcagtaatttgtttcacaagtggaactacaggcaaccccaaaggagcaatggtcactcaccgaaacatagtgagcgattgttcagcttttgtgaaagcaacagagaatacagtcaatccttgcccagatgatactttgatatctttcttgcctctcgcccatatgtttgagagagttgtagagtgtgtaatgctgtgtcatggagctaaaatcggatttttccaaggagatatcaggctgctcatggatgacctcaaggtgcttcaacccactgtcttccccgtggttccaagactgctgaaccggatgtttgaccgaattttcggacaagcaaacaccacgctgaagcgatggctcttggactttgcctccaagaggaaagaagcagagcttcgcagcggcatcatcagaaacaacagcctgtgggaccggctgatcttccacaaagtacagtcgagcctgggcggaagagtccggctgatggtgacaggagccgccccggtgtctgccactgtgctgacgttcctcagagcagccctgggctgtcagttttatgaaggatacggacagacagagtgcactgccgggtgctgcctgaccatgcctggagactggaccgcaggccatgttggggccccgatgccgtgcaatttgataaaacttgttgatgtggaagaaatgaattacatggctgccgagggcgagggcgaggtgtgtgtgaaagggccaaatgtatttcagggctacttgaaggacccagcgaaaacagcagaagctttggacaaagacggctggttacacacaggggacattggaaaatggttaccaaatggcaccttgaaaattatcgaccggaaaaagcacatatttaagctggcacaaggagaatacatagcccctgaaaagattgaaaatatctacatgcgaagtgagcctgttgctcaggtgtttgtccacggagaaagcctgcaggcatttctcattgcaattgtggtaccagatgttgagacattatgttcctgggcccaaaagagaggatttgaagggtcgtttgaggaactgtgcagaaataaggatgtcaaaaaagctatcctcgaagatatggtgagacttgggaaggattctggtctgaaaccatttgaacaggtcaaaggcatcacattgcaccctgaattattttctatcgacaatggccttctgactccaacaatgaaggcgaaaaggccagagctgcggaactatttcaggtcgcagatagatgacctctattccactatcaaggtttagtgtgaagaagaaagctcagaggaaatggcacagttccacaatctcttctcctgctgatggccttcatgttgttaattttgaatacagcaagtgtagggaaggaagcgttcgtgtttgacttgtccattcggggttcttctcataggaatgctagaggaaagagaacactgccttacagtcacctcatgttgcagaccatgtttatggtaatacacactttcc

SEQ ID NO: 7555 - DNA, 5824 bp, Homo sapiens
cgcccaggcccgcagcgcggcgctgcagcgcgaggggcggagaggcagagagcccgaaaggaccagacgcccaggtcgcccgcatcccgctgccgcaggagagagacagcgcgccccggccctgctccccaggcttcgcccgggcgccctcaactctgtccccagagactgagcacctgtcctccgcctcggcctctgctgagagccctctcctctggagcacacaccacccctgcagcccaagaagagtcccagccccacgccggctaccaccatggcggagaccaacaacgaatgtagcatcaaggtgctctgccgattccggcccctgaaccaggctgagattctgcggggagacaagttcatccccattttccaaggggacgacagcgtcgttattggggggaagccatatgtttttgaccgtgtattccccccaaacacgactcaagagcaagtttatcatgcatgtgccatgcagattgtcaaagatgtccttgctggctacaatggcaccatttttgcttatggacagacatcctcagggaaaacacataccatggagggaaagctgcacgaccctcagctgatgggaatcattcctcgaattgcccgagacatcttcaaccacatctactccatggatgagaaccttgagttccacatcaaggtttcttactttgaaatttacctggacaaaattcgtgaccttctggatgtgaccaagacaaatctgtccgtgcacgaggacaagaaccgggtgccatttgtcaagggttgtactgaacgctttgtgtccagcccggaggagattctggatgtgattgatgaagggaaatcaaatcgtcatgtggctgtcaccaacatgaatgaacacagctctcggagccacagcatcttcctcatcaacatcaagcaggagaacatggaaacggagcagaagctcagtgggaagctgtatctggtggacctggcagggagtgagaaggtcagcaagactggagcagagggagccgtgctggacgaggcaaagaatatcaacaagtcactgtcagctctgggcaatgtgatctccgcactggctgagggcactaaaagctatgttccatatcgtgacagcaaaatgacaaggattctccaggactctctcgggggaaactgccggacgactatgttcatctgttgctcaccatccagttataatgatgcagagaccaagtccaccctgatgtttgggcagcgggcaaagaccattaagaacactgcctcagtaaatttggagttgactgctgagcagtggaagaagaaatatgagaaggagaaggagaagacaaaggcccagaaggagacgattgcgaagctggaggctgagctgagccggtggcgcaatggagagaatgtgcctgagacagagcgcctggctggggaggaggcagccctgggagccgagctctgtgaggagacccctgtgaatgacaactcatccatcgtggtgcgcatcgcgcccgaggagcggcagaaatacgaggaggagatccgccgtctctataagcagcttgacgacaaggatgatgaaatcaaccaacaaagccaactcatagagaagctcaagcagcaaatgctggaccaggaagagctgctggtgtccacccgaggagacaacgagaaggtccagcgggagctgagccacctgcaatcagagaacgatgccgctaaggatgaggtgaaggaagtgctgcaggccctggaggagctggctgtgaactatgaccagaagtcccaggaggtggaggagaagagccagcagaaccagcttctggtggatgagctgtctcagaaggtggccaccatgctgtccctggagtctgagttgcagcggctacaggaggtcagtggacaccagcgaaaacgaattgctgaggtgctgaacgggctgatgaaggatctgagcgagttcagtgtcattgtgggcaacggggagattaagctgccagtggagatcagtggggccatcgaggaggagttcactgtggcccgactctacatcagcaaaatcaaatcagaagtcaagtctgtggtcaagcggtgccggcagctggagaacctccaggtggagtgtcaccgcaagatggaagtgaccgggcgggagctctcatcctgccagctcctcatctctcagcatgaggccaagatccgctcgcttacggaatacatgcagagcgtggagctaaagaagcggcacctggaagagtcctatgactccttgagcgatgagctggccaagctccaggcccaggaaactgtgcatgaagtggccctgaaggacaaggagcctgacactcaggatgcagatgaagtgaagaaggctctggagctgcagatggagagtcaccgggaggcccatcaccggcagctggcccggctccgggacgagatcaacgagaagcagaagaccattgatgagctcaaagacctaaatcagaagctccagttagagctagagaagcttcaggctgactacgagaagctgaagagcgaagaacacgagaagagcaccaagctgcaggagctgacatttctgtacgagcgacatgagcagtccaagcaggacctcaagggtctggaggagacagttgcccgggaactccagaccctccacaaccttcgcaagctgttcgttcaagacgtcacgactcgagtcaagaaaagtgcagaaatggagcccgaagacagtggggggattcactcccaaaagcagaagatttcctttcttgagaacaacctggaacagcttacaaaggttcacaaacagctggtacgtgacaatgcagatctgcgttgtgagcttcctaaattggaaaaacgacttagggctacggctgagagagttaaggccctggagggtgcactgaaggaggccaaggagggcgccatgaaggacaagcgccggtaccagcaggaggtggaccgcatcaaggaggccgttcgctacaagagctcgggcaaacggggccattctgcccagattgccaaacccgtccggcctggccactacccagcatcctcacccaccaacccctatggcacccggagccctgagtgcatcagttacaccaacagcctcttccagaactaccagaatctctacctgcaggccacacccagctccacctcagatatgtactttgcaaactcctgtaccagcagtggagccacatcttctggcggccccttggcttcctaccagaaggccaacatggacaatggaaatgccacagatatcaatgacaataggagtgacctgccgtgtggctatgaggctgaggaccaggccaagcttttccctctccaccaagagacagcagccagctaatctcccacacccacggctgcatacctgcactttcagtttctaagagggactgaggcctcttctcagcatgctgcaaacctgtggtctctgatactaactccctccccaacccctgttgttggactgtactatgtttgatgtcttctcttacttactctgtatctctttgtactctgtatctatatatcaaaagctgctgctatgtctctcttctgtcttattctcaagtatctactgatgtatttagcaatttcaaagcatagtctaccttccttatttggggcaatagggaggagggtgaatgtttcttctttctcatctactcgtctcacactgagtggtgttagtcactgagtagaggtcacagagatgacaaaaggaaaaatgggagctagagggttgtgacccttcatacacacacgcacgcacgcacacaaacatgcacacacgcatgcacacacacaaagccttaagcagaagaatgtcttagcatcatgagacagagaaatagactcttcctccctcctctttcacatatagcacaggggaaggtaaaatggaagggctgctaattgagacatataattttcttcatacacccctcaccttaatcaaaggattcaggtgttacttctgccctacaaagtctgccttttgcctccctcttcctgttttcccctggactgagaaatgggttgctcaagggaccatttccctttttcttcaagctccttttgatattccctgccccagagctcatgaccagaacccagagctgatttaaaatattttgaaaaatggaggaggcagactgctcccagcagcctgtcaatggctgctcatctgtccatggagatggttacaggcaggtgtagtcaaaatgattgattccttgggtttgggggtgaataggctgggaaatttctgagccttttttttttgtcacagtgccctcaagttgaagtgatgagctggatttctttcttgttccatactgggcggcatgctcctcccatctccaccccttggtttgggggcttccagctcattggcaaaatctctctagttgccttcctttcaagctggagcctgacttttccccaatgtacattttttttttctccacaaagagttccttctctaatgtccccatctggtattaagtgcactttaaagaaaggggcagggtggattttcaagaggtgggaagctctaaggcttgaccctgaggggtcttctcccagccattctcagcccatatgcagcaccctccatactgaagaggactgttgttttagtttcagacggtcctttccttccacatggtgctaaggtggttttctaggtaactgcagggatggaggtcactagccattccaaaccaggagagaaagtctggtgtcctgatatccagtcttttctaggaggaagaccaagattctccagcggcagggcagcctatcacccaacttctaagtcaggaaaggaagctgagtgggaatgccagctggtaagcgcaggctgcactggcccatgactccttcaaggaaaagaggccctgctccctttacctgctgagctccttttagcagttagggagaactgcagggggaaaaataccagtggagtgtggaataaatccaaagcagtgatttttaaatgtttttcaaaaacaaatcttacatagaaccccaatataaaaaataaagtaatgcagacctgggcagtttgcatttttttttttttttttttttggtggaagaagtctcagcgtctcttaggactgactgttcaaaggctcctcagcaaatgagcccttgaacagtcctaagagaccctgaggattctgtggagtagtttgaaaaccattgttctgaggaagggggtccaatctggctcctctgcactaaagctgcaactcatggaaaagagggcaacggtggggtagacaagccatgctgtctccagacccactagggtggaaggaaggttcctgtgggcctgtggacttaggctaatatttgctgtcagcagggcacttaagaatccagggggttttatgtaatgttgccaccacatggttcttttaaaaacacataaggaaatgtgagggtgtagcgcagatgaggagagagatgacacagagggagcagccttctctttagcaagatgtaagggaaatataattcacttacataaaaaagaaacaacacacacgcaaacccttcaccagaagcttcacactacatcctcctcctcctcctgctccccaccttcaccgcatccctttcagagccagggtcactgcaaggggcacctggcctgcccactcacatctgccaaaatgttgcatgccagcgtggaagacaaaccaaactgcgcaaccccctgtgtgtatttacttggtgtacatagataactttaaaataaaataaattcaatgataactct

SEQ ID NO: 7556 - DNA, 567 bp, Homo sapiens
ccagttaccccctgaaacatttcagttgtgaacgttctttcctgctagcttctcccatgaggggaaaacgatgggtttgaaattcacatccctatctgtactttgaagaacaccagcatttgccacaatgctgtcatccactgactttacatttgcttcctgggagcttgtggtccgcgttgaccatcccaatgaagagcagcagaaagacgtcacactgagagtatctggagaccttcatgttggaggagtgatgctcaagttagtagaacagatcaatatatcccaagactggtcagactttgctctttggtgggaacagaagcattgctggcttctgaaaacccactggaccctggacaaatatggggtccaggcagatgcaaagcttctcttcacccctcagcataaaatgctgcgccttcgtctgccgaatttgaagatggtgaggttgcgagtcagcttctcagctgtggtttttaaagctgtcagtgatatctgcaaaatcctgaatattagaagatcagaagagctttccttgttaaagccgtctggtgactattttaa

SEQ ID NO: 7557 - DNA, 1909 bp, Homo sapiens; identical to SEQ ID NO: 6668

SEQ ID NO: 7558 - DNA, 6922 bp, Homo sapiens
accctcttttcttatcattgacatttaaactctggggcaggtcctcgcgtagaacgcggctgtcagatctgccacttcccctgccgagcggcggtgagaagtgtgggaaccggcgctgccaggctcacctgcctccccgccctccgctcccaggaatctgagaattgctctcacacaccaacccagcaacatccgtggagaaaactctcaccagcaactcctttaaaacaccgtcatttcaaaccattgtggtcttcaagcaacaacagcagcacaaaaaaccccaaccaaacaaaactcttgacagaagctgtgacaaccagaaaggatgcctcataaagggggaagactttaactaggggcgcgcagatgtgtgaggccttttattgtgagagtggacagacatccgagatttcagagccccatattcgagccccgtggaatcccgcggcccccagccagagccagcatgcagaacagtcacagcggagtgaatcagctcggtggtgtctttgtcaacgggcggccactgccggactccacccggcagaagattgtagagctagctcacagcggggcccggccgtgcgacatttcccgaattctgcagacccatgcagatgcaaaagtccaagtgctggacaatcaaaacgtgtccaacggatgtgtgagtaaaattctgggcaggtattacgagactggctccatcagacccagggcaatcggtggtagtaaaccgagagtagcgactccagaagttgtaagcaaaatagcccagtataagcgggagtgcccgtccatctttgcttgggaaatccgagacagattactgtccgagggggtctgtaccaacgataacataccaagcgtgtcatcaataaacagagttcttcgcaacctggctagcgaaaagcaacagatgggcgcagacggcatgtatgataaactaaggatgttgaacgggcagaccggaagctggggcacccgccctggttggtatccggggacttcggtgccagggcaacctacgcaagatggctgccagcaacaggaaggagggggagagaataccaactccatcagttccaacggagaagattcagatgaggctcaaatgcgacttcagctgaagcggaagctgcaaagaaatagaacatcctttacccaagagcaaattgaggccctggagaaagagtttgagagaacccattatccagatgtgtttgcccgagaaagactagcagccaaaatagatctacctgaagcaagaatacaggtatggttttctaatcgaagggccaaatggagaagagaagaaaaactgaggaatcagagaagacaggccagcaacacacctagtcatattcctatcagcagtagtttcagcaccagtgtctaccaaccaattccacaacccaccacaccggtttcctccttcacatctggctccatgttgggccgaacagacacagccctcacaaacacctacagcgctctgccgcctatgcccagcttcaccatggcaaataacctgcctatgcaacccccagtccccagccagacctcctcatactcctgcatgctgcccaccagcccttcggtgaatgggcggagttatgatacctacacccccccacatatgcagacacacatgaacagtcagccaatgggcacctcgggcaccacttcaacaggactcatttcccctggtgtgtcagttccagttcaagttcccggaagtgaacctgatatgtctcaatactggccaagattacagtaaaaaaaaaaaaaaaaaaaaaaaggaaaggaaatattgtgttaattcagtcagtgactatggggacacaacagttgagctttcaggaaagaaagaaaaatggctgttagagccgcttcagttctacaattgtgtcctgtattgtaccactggggaaggaatggacttgaaacaaggacctttgtatacagaaggcacgatatcagttggaacaaatcttcattttggtatccaaacttttattcattttggtgtattatttgtaaatgggcatttgtatgttataatgaaaaaaagaacaatgtagactggatggatgtttgatctgtgttggtcatgaagttgttttttttttttttaaaaagaaaaccatgatcaacaagctttgccacgaatttaagagttttatcaagatatatcgaatacttctacccatctgttcatagtttatggactgatgttccaagtttgtatcattcctttgcatataattaaacctggaacaacatgcactagatttatgtcagaaatatctgttggttttccaaaggttgttaacagatgaagtttatgtgcaaaaaagggtaagatataaattcaaggaagaaaaaaagttgatagctaaaaggtagagtgtgtcttcgatataatccaatttgttttatgtcaaaatgtaagtatttgtcttccctagaaatcctcagaatgatttctataataaagttaatttcatttatatttgacaagaatatagatgttttatacacattttcatgcaatcatacgtttcttttttggccagcaaaagttaattgttcttagatatagttgtattactgttcacggtccaatcattttgtgcatctagagttcattcctaatcaattaaaagtgcttgcaagagttttaaacttaagtgttttgaagttgttcacaactacatatcaaaattaaccattgttgattgtaaaaaaccatgccaaagcctttgtatttcctttattatacagttttctttttaaccttatagtgtggtgttacaaattttatttccatgttagatcaacattctaaaccaatggttactttcacacacactctgttttacatcctgatgatccttaaaaaataatccttatagataccataaatcaaaaacgtgttagaaaaaaattccacttacagcagggtgtagatctgtgcccatttatacccacaacatatatacaaaatggtaacatttcccagttagccatttaattctaaagctcaaagtctagaaataatttaaaaatgcaacaagcgattagctaggaattgttttttgaattaggactggcattttcaatctgggcagatttccattgtcagcctatttcaacaatgatttcactgaagtatattcaaaagtagatttcttaaaggagactttctgaaagctgttgcctttttcaaataggccctctcccttttctgtctccctcccctttgcacaagaggcatcatttcccattgaaccactacagctgttcccatttgaatcttgctttctgtgcggttgtggatggttggagggtggaggggggatgttgcatgtcaaggaataatgagcacagacacatcaacagacaacaacaaagcagactgtgactggccggtgggaattaaaggccttcagtcattggcagcttaagccaaacattcccaaatctatgaagcagggcccattgttggtcagttgttatttgcaatgaagcacagttctgatcatgtttaaagtggaggcacgcagggcaggagtgcttgagcccaagcaaaggatggaaaaaaataagcctttgttgggtaaaaaaggactgtctgagactttcatttgttctgtgcaacatataagtcaatacagataagtcttcctctgcaaacttcactaaaaagcctgggggttctggcagtctagattaaaatgcttgcacatgcagaaacctctggggacaaagacacacttccactgaattatactctgctttaaaaaaatccccaaaagcaaatgatcagaaatgtagaaattaatggaaggatttaaacatgaccttctcgttcaatatctactgttttttagttaaggaattacttgtgaacagataattgagattcattgctccggcatgaaatatactaataattttattccaccagagttgctgcacatttggagacaccttcctaagttgcagtttttgtatgtgtgcatgtagttttgttcagtgtcagcctgcactgcacagcagcacatttctgcaggggagtgagcacacatacgcactgttggtacaattgccggtgcagacatttctacctcctgacattttgcagcctacattccctgagggctgtgtgctgagggaactgtcagagaagggctatgtgggagtgcatgccacagctgctggctggcttacttcttccttctcgctggctgtaatttccaccacggtcaggcagccagttccggcccacggttctgttgtgtagacagcagagactttggagacccggatgtcgcacgccaggtgcaagaggtgggaatgggagaaaaggagtgacgtgggagcggagggtctgtatgtgtgcacttgggcacgtatatgtgtgctctgaaggtcaggattgccagggcaaagtagcacagtctggtatagtctgaagaagcggctgctcagctgcagaagccctctggtccggcaggatgggaacggctgccttgccttctgcccacaccctagggacatgagctgtccttccaaacagagctccaggcactctcttggggacagcatggcaggctctgtgtggtagcagtgcctgggagttggccttttactcattgttgaaataatttttgtttattatttatttaacgatacatatatttatatatttatcaatggggtatctgcagggatgttttgacaccatcttccaggatggagattatttgtgaagacttcagtagaatcccaggactaaacgtctaaattttttctccaaacttgactgacttgggaaaaccaggtgaatagaataagagctgaatgttttaagtaataaacgttcaaactgctctaagtaaaaaaatgcattttactgcaatgaatttctagaatatttttcccccaaagctatgcctcctaacccttaaatggtgaacaactggtttcttgctacagctcactgccatttcttcttactatcatcactaggtttcctaagattcactcatacagtattatttgaagattcagctttgttctgtgaatgtcatcttaggattgtgtctatattcttttgcttatttctttttactctgggcctctcatactagtaagattttaaaaagccttttcttctctgtatgtttggctcaccaaggcgaaatatatattcttctctttttcatttctcaagaataaacctcatctgcttttttgtttttctgtgttttggcttggtactgaatgactcaactgctcggttttaaagttcaaagtgtaagtacttagggttagtactgcttatttcaataatgttgacggtgactatctttggaaagcagtaacatgctgtcttagaaatgacattaataatgggcttaaacaaatgaataggggggtccccccactctccttttgtatgcctatgtgtgtctgatttgttaaaagatggacagggaattgattgcagagtgtcgcttccttctaaagtagttttattttgtctactgttagtatttaaagatcctggaggtggacataaggaataaatggaagagaaaagtagatattgtatggtggctactaaaaggaaattcaaaaagtcttagaacccgagcacctgagcaaactgcagtagtcaaaatatttatctcatgttaaagaaaggcaaatctagtgtaagaaatgagtaccatatagggttttgaagttcatatactagaaacacttaaaagatatcatttcagatattacgtttggcattgttcttaagtatttatatctttgagtcaagctgataattaaaaaaaatctgttaatggagtgtatatttcataatgtatcaaaatggtgtctatacctaaggtagcattattgaagagagatatgtttatgtagtaagttattaacataatgagtaacaaataatgtttccagaagaaaggaaaacacattttcagagtgcgtttttatcagaggaagacaaaaatacacacccctctccagtagcttatttttacaaagccggcccagtgaattagaaaaacaaagcacttggatatgatttttggaaagcccaggtacacttattattcaaaatgcacttttactgagtttgaaaagtttcttttatatttaaaataagggttcaaatatgcatattcaatttttatagtagttatctatttgcaaagcatatattaactagtaattggctgttaattttatagacatggtagccagggaagtatatcaatgacctattaagtattttgacaagcaatttacatatctgatgacctcgtatctctttttcagcaagtcaaatgctatgtaattgttccattgtgtgttgtataaaatgaatcaacacggtaagaaaaaggttagagttattaaaataataaactgactaaaatactcatttgaatttattcagaatgttcataatgctttcaaaggacatagcagagcttttgtggagtatccgcacaacattatttattatctatggactaaatcaattttttgaagttgctttaaaatttaaaagcacctttgcttaatataaagccctttaattttaactgacagatcaattctgaaactttattttgaaaagaaaatggggaagaatctgtgtctttagaattaaaagaaatgaaaaaaataaacccgacattctaaaaaaatagaataagaaacctgatttttagtactaatgaaatagcgggtgacaaaatagttgtctttttgattttgatcacaaaaaataaactggtagtgacaggatatgatggagagatttgacatcctggcaaatcactgtcattgattcaattattctaattctgaataaaagctgtatacagta

SEQ ID NO: 7559 - DNA, 2035 bp, Homo sapiens
ttcaacccattacaattggatccagttccctccggaggctccttcctgtctctcccagctcctgggggctccaggcatccctgggcttgtggccgcgtcattccaggctctgtctccgtctccacgtggccttctcctctgtgtctgtgtctcctctcctgtctcttagaaggacacctgtcgaccactgcttgagataatttttatgaacagggtgagggtggccccctaactggccaggcttgggccacacccctctcttgggtgattgacaggctttggccacacacccccatcttcagtgattgacaggctgatactatacaatatatcgtatataattattaaatatacatacaatataacatgtttaatttatgctgaggcaggaggatttcttgagtctaggacttggagaccagcctgagcaacaaactgcaaagcatacgtgctatttccacactcttcttttgcagcagggcaggagccacacactcaaccactttgggttttttttttttttttcaccaaatggcatttcatgttaattcttctggccacagctctgacgtctgaccccaccccagctcaggggcccaagagatgctttagctcatgttccatctgtcttcctgaagaccaggtctcctcctctgtgatggggtgggaggtccgtgacggcaaggcaatgaggggcacgtgcaggcattttaaggaatcgctcttcatccacagctggtcactaaccatgatgagaccactgtccctttccacgacaccagcttcttgctaggaacatctgcctggggtcttttctctccccgaaagcctcttgcagacattctttggaaagtactcctgagctctgtgtgtttgttgaaggctgctcttgtcacacagttgcttgagggcaggtttctcagccttagcactgctgattatcctataatcttgtgcttttcatgctttatctttcttttaaggttcttcctctcttttatttggtatgatgacgctttctctaatttctttgaagtctgttggttaaaacttttcctctcttttctcggtgtattggtttgcgacagctgccataactaaggtggttatagccagaagacaatagctggcaaaaaagggtctgtcaccggcatgcaatccctgctgcccacgaggagatgccttttgtctatttctcatcccaaccctgtaaggtccacccggaacaagactgtagtgatcactgcactcagcatctgaaccctttagaaaggggttcccagggcggaaggagaggagagagggaaggagaggagagagggaaggggagagggaaggagaggggagagggaaggagaaggaaggggaggggagaggggagagggaaggggaggggagaggggagagggaaggagagggaaaataaaaatattagctgggcagggtggcatgcacctgcagtcccaggtactcaggaggattgcttgaggccaggagtttgagaccagcctgggaaatgtagcaaaactgtgtatctataaaaaataaaaatgttagctgggctaacacaggtctattgactcacacacatgttttaagatggaaaactttacttctgttcttggcaggacatggagagagggagggattccaaaaagtctcagcctccatcaaggcgtggcagctgctgcctgcgccattgcaggtcttggcgccgcaggcggggtggggaggggcggggcgagcgccgggggcggggacggggcccgggaggcggagctgggggcggtgcttcaccaagcggccggggcggtgcccgggggggaggcgggcgggggtgtggcctgggcgtggcctcacggggagctcaatggcggcgtggcatgggcgtggcctggcggagagggcaaggaggtgtggcctgggcgtggcctggcggagcggtcaatggcggcgtgacatgggcgtggcctggcggagagggcaatggaggtgtggcctgggcgtggcctgacggagagggcaatggaggcgt

SEQ ID NO: 7560 - DNA, 376 bp, Homo sapiens
caggagcggccatgaagaagctgatggtggtgctgagtctgattgctgcagcctgggcagaggagcagaataagttggtgcatggcggaccctgcgacaagacatctcacccctaccaagctgccctctacacctcgggccacttgctctgtggtggggtccttatccatccactgtgggtcctcacagctgcccactgcaaaaaaccggtgattctgggggtccgctggtatgtggagaccacctccgaggccttgtgtcatggggtaacatcccctgtggatcaaaggagaagccaggagtctacaccaacgtctgcagatacacgaactggatccaaaaaaccattcaggccaagtgaccctgacatgtgaca

SEQ ID NO: 7561 - DNA, 3656 bp, Homo sapiens
gcctctcgcctctggacggcggcggggcggccgccggattcgcggccgcagggagcgccggagacggggagctattccgccccggcggctccattcggcgcccgcagccctcagggggtcggccccgcggcttgggagagggcaccgcggcctcggtgtgcgcagccctcgggcgcgagggtcggcggcgcggacacagccgcgttcccagccggtggggctcagcgctggcgccggcgaggactccccggccacccgcaggtaccgccgggcggagggcgcgctactagcagcgccggagatactcgagcccagggacccccgggccagcggagggcaggagcggagccccgagggagcgcgggccccgacggcgcgctcccccgtcagccacgggcaggcaggccccgcgtggcggcttggggtggggggctgcagcggggccctcgggccgaaagtcccccgggcggccagccatgaccttcgggcgcagcggggcggcctcggtggtgctgaacgtgggcggcgcccggtattcgctgtcccgggagctgctgaaggacttcccgctgcgccgcgtgagccggctgcacggctgccgctccgagcgcgacgtgctcgaggtgtgcgacgactacgaccgcgagcgcaacgagtacttcttcgaccggcactcggaggccttcggcttcatcctgctctacgtgcgcggccacggcaagctgcgcttcgcgccgcggatgtgcgagctctccttctacaacgagatgatctactggggcctggagggcgcgcacctcgagtactgctgccagcgccgcctcgacgaccgcatgtccgacacctacaccttctactcggccgacgagccgggcgtgctgggccgcgacgaggcgcgccccggcggggccgaggcggctccctccaggcgctggctggagcgcatgcggcggaccttcgaggagcccacgtcgtcgctggccgcgcagatcctggctagcgtgtcggtggtgttcgtgatcgtgtccatggtggtgctgtgcgccagcacgttgcccgactggcgcaacgcagccgccgacaaccgcagcctggatgaccggagcaggataattgaagctatctgcataggttggttcactgccgagtgcatcgtgaggttcattgtctccaaaaacaagtgtgagtttgtcaagagacccctgaacatcattgatttactggcaatcacgccgtattacatctctgtgttgatgacagtgtttacaggcgagaactctcaactccagagggctggagtcaccttgagggtacttagaatgatgaggattttttgggtgattaagcttgcccgtcacttcattggtcttcagacactcggtttgactctcaaacgttgctaccgagagatggttatgttacttgtcttcatttgtgttgccatggcaatctttagtgcactttctcagcttcttgaacatgggctggacctggaaacatccaacaaggactttaccagcattcctgctgcctgctggtgggtgattatctctatgactacagttggctatggagatatgtatcctatcacagtgcctggaagaattcttggaggagtttgtgttgtcagtggaattgttctattggcattacctatcacttttatctaccatagctttgtgcagtgttatcatgagctcaagtttagatctgctaggtatagtaggagcctctccactgaattcctgaattaatgcattgcaaatcaattcttgcatacacttcatagaaagactttgatgctgcttcatatttatgtgtttcttgctgggtgagcactgcagtggcattgtcatcatcttggtagggtaaaaattatccttcccagccgaagggataaaacagtttacttgttatggagtaaatagaattgagactgcaaaggaagaataatgactcctagagtaaactttaggacccggttttatttagacttgttttcccgtttccttgaatgattacacatttttaaaaaatacattatttgaacattttaaaacagaaaggtactattttccaaatgtttttccatcttatgaattcagaagaagcttggaacttatagtgttttttgtttgagagtaacattttcatttctaaatgttttataatttctcatatcaatgtcagaagtatcctggaaacatatgtcacatgcgggaactgtttaacaaatactttaaaaatttggccaaaatttaaactgtataatggagctagatacaagcaagaatagtatttgaaagacttttccagcatacttctcaattctttgctttatttttgtgccaattattcaccttatcgtgccgcttcatggaagcttgagtatgttctcccttttccattttggatttatctctttactgtaatgactcaaaaggtatttaagaattgacgagagcttgtgttgtttagcatcttactggataatatttgaattcattgctgttcctaggtgataactgtcctaatatttagatgtccaaacaagaatacttccaacataaaaattataataggaataatttgagatgactcaatattacaacctcttcttctcttaacctcctcccccaaacactagaggtttaataagacttatcagatgaaaggatatttatatagccttttagtagcaaagtcatacttacgtgttgtcactggattatcataaaagggagaaattaaatattactgtactcttagttgctgtgtagctaagtcaattttaagccagtaaaagcgatggatacataatgatttgatctgatctttaactattgtgaatcacagctacaccaaaactcttcttgtaagaatactgactaatatgccatgttaatctggctagattattaggactagataatgtaaaagtgatgattgtttagtaactaaattttagcaacagaaattagaattttgctttttcaaccagttaccataaagaagttagtgtatatataaacacaaataattagtgacagattcataaaaaattgaatgttgtacacagtaattttgtcagaggtagagaagacagggattgggaagtggtgggtgatggaggacctggatatatttatcaaataaagggttaccagaagtgttcattaaaggaattttagccatcatctagttcaaacctcaactattacaggtagaaaatcagggcaggagagaatataattgtgaaggagtcagggctaacacctggatctccagaaacctagcccagcaggttaatcttcacacatctctgggttctgagaaaagcctggaaaaatcacacttctttgtcattgtcatgctgaggtaataatagcaaaactgttttctttcccttaatttcctttcctaagcttatgtaatagtttggccattaaatatcttgccctattttccctattactgctagtatgctacttcttacatacccaaaagaaattcagttatttattgtatatttattgtattctaatataattgaaataaatggcatggatttattttttcttaactatttggattaaagctttgtggttcatgcaaacaatgtgcagatgatagcacctccatattactaataaaaa

SEQ ID NO: 7562 - DNA, 1606 bp, Homo sapiens
acagtctcgagggaagagggtctggtggaaggagatgacgccgtctctcagcgctgaggaaaacagaatgtataataagatgtggcatcagacccaagaagccctcggtgctttactcgataaagagcctcagaagatgattgaaccacaaagaaatcaggttttcatctttcaaacattagccaccttctacgtaaagtatgtgcagatctttagaaacctagagaatgtctacgaccagttcgtccacccccagaaacgaatactgatcaggaaagtcctggacggggtgatgggccgcatcctggagctgaagaacgagatggtggagctggaactcacggagttccattatttcgatgatatcctgcaggatctcaagctggccccccaacaattagatattcccatacccaagtattttttgaaggagaagttggaagtaataaaaggaagagagaaaattcttgctcaaatattagcggacagcggaatagatacatctgacatgaaataccctgtaaagagtatccctttcgatgaggctgttaaattaatccagattgctgagagggcacggcaaggtcgcctaagggctttattcatgaagcaaatctatctgcaagaatatagagcaaagcaatccaagatgcttggcaagaaagtgacagatacctgggctgctgcactccgcattcagaaggtttggcgacgtttccatcaacgtaaggaaactgaaaaactgagagaagaggagatgatcttcctgggtatgaatccacctcctctctttaatgaagtcagtgctacagtaatccaggctgaaaaggtggaccgcctgcggaatgaggtgcagataaagcatgaagaggactacagggaagccctggttaccatcaagaatgacctaaagttgatagaaggcgtggatatcaaggagaaccttcaagaccagatccggcattggttcatcgaatgcagaaatttaaccgggacatttcctgactaccctgacgttgaagaaggagggtcagctattattttttctgacaagaccatacaacaggttattgaggatatcatagcaaaccaagaggaagaagaaaaaaacaaaaagaagaagaagaaaaaggaaaaacaacccaagaaagccaaaaaacaaaagaaaggaacaaaggagaaaaataaggaagaagacgaaaaatggaaaatgtcaccaagtctttttcttcctgcaatgaaggaaggatgtaacgcatacaaagaaatctggatgaaaaaagatgagtcttggaatttctctcaggactatgatccagaactgatcaaagaggagaaacgaaaagaattacagtcagagatcaggatacaggttgatgagttgatgagacaggaacttaaaaacttaaagctagctgtggacagagaaagggagcgcccagtgaaagcaggaaagaaaaaggacaagaagaaaggaaagaaaggcaaaaagaaagagaagaaggcaaagaaggataaagatctgacagctgacaggaccatcgagtctctgtataaggaactggtggaagaaggattactgatccaggctctgaaagtcaacctc

SEQ ID NO: 7563 - DNA, 583 bp, Homo sapiens
agccgctgcgcccgagctggcctgcgagttcagggctcctgtcgctctccaggagcaacctctactccggacgcacaggcattccccgcgcccctccagccctcgccgccctcgccaccgctcccggccgccgcgctccggtacacacagcaaacgcggggtcaaagagggatggtcccggccctgtccccatgcccagccccgtttctgcgcaccgtccctccctgcctagctgatctctgaccctcggctcttgtgcttcctgctacaggatccctgctgggcaccaacagctccaccatggggctggcctggggactaggcgtcctgttcctgatgcatgtgtgtggcaccaaccgcattccagagtctggcggagacaacagcgtgtttgacatctttgaactcaccggggccgcccgcaaggggtctgggcgccgactggtgaagggccccgacccttccagcccagctttccgcatcgaggatgccaacctgatcccccctgtgcctgatgacaagttccaagacctggtggatgctgtgcgggcagaaaagggtttcctccttctggcatccctga

SEQ ID NO: 7564 - DNA, 2106 bp, Homo sapiens
ccctctgagccagtagtgccagcagtgatgatggccacccatgagcccagtgctgacctggcacccaagaaaaagcccaggaagtcaagcatgcctgtgaagattgagaaggaaattattgataccgccgatgagtttgatgatgaagatgatgaccccaatgatggtggagctgtggtcaatgacatgagccatgacaatcattgtcactcccaagaggagatgagcccaggcatgtctgtgaaggacttttctaagcataacaggacccggtgcatttcaaggactgaaataaggagggccgacagcatgacttctgaagaccaagaacctgagcgggactatgagaacgagtctgagtcttcggagcccaaactgggcgaggaatccatggaaggggatgagcacattcacagcgaagtgagtgaaaaagtcctgatgaatagtgagaggcctgatgagaaccacagtgagccctctcaccaggacgtcatcaaggtgaaggaagaatttacagaccccacttacgacatgttttacatgagccagtatggactgtacaatggtgggggtgccagcatggccgccttgcatgagagctttacatcgtctctgaattatggcagccctcaaaagttctccccagaaggtgacctatgttctagcccagaccccaaaatctgttatgtgtgcaagaagagtttcaaaagctcctacagtgtgaaacttcactacaggaacgttcacttgaaagagatgcacgtctgcacagtggctggttgcaatgctgcattcccctctcgccgaagccgagacagaaacagaaatttacggatggaaagaaccataggtccaggacatcgagacagcctgcatctccgaagaggaaattctaaccggcctggaacctgctgtcttcatacgggagattctcttgaagagagcgtgatagtcagaattagctgcaaaagattagaaagctgatcttattgtcacaagacacagtgccaacataaacctacatcgtaaactgttgaccaaagaactcgatgacatgggcctggactcgtcgcagccctcccttagcaaggacctccgcgatgaatttttggtgaagatatatggtgcccagcaccccatggggctcgatgtcagggaagacgcctcctctcccgcagggactgaagactcccacctgaacgggtatgggagaggcatggcagaggactacatggtccttgacttgagcaccacctccagcctccagtccagcagcagtatccattcctccagagaatccgacgcaggcagcgatgaggggattcttctcgatgacattgacggggcgagtgacagtggggagtcggcacacaaggccgaggcccctgccctccctggcagcctaggggctgaagtttcaggatctcttatgttcagcagcttgtctgggagcaatggtgggatcatgtgcaacatttgccacaaaatgtacagcaacaaggggaccctgagagtgcactacaaaactgtgcatttgagagaaatgcacaagtgcaaagtcccaggttgcaatatgatgttttcctctgtacgaagccgaaatcggcacagtcagaaccctaatctccacaaaaacattcccttcacttcagtagattagtctcagaatggacactacaaatgccagctctcaccagatggcctacgtgtttgaactgccatagtcagtgtgcgcttatgtacttggggtgtgtgtgtgtgtgtgtgtgtgtgtgcatttatgtatgctctgtggctacatatacacacacgtatttccttgagataaacaagataaacactaggtgcttttgaatttttttcacttccctttatagttttgggaaaggagtgggatctttgatttcagggtgaaaacagagtacccctttaaacacacacacacacacatgcacatacacacacacacacacacacacacacagtgtgcaactagccccagttttgacagaataattcttggtcttccccaaagagacaatttgttgtacccatgactgttgcctgcaaaaataaaagggaaaaaaaagaaaaaagaaacaaaaa

SEQ ID NO: 7565 - DNA, 570 bp, Homo sapiens
actggctatcgcggctcatagtatgtaatcgtttcctaaaaagtcctatttttcttttcctttgctcctgttgtcccatattagggtttaataaacttgctgtcctgttcttagggtcaattgcaagcaatattttatcaaaccaaattctgcttttttaactttatgacttctataggctccctacagacacttcaagtaaagctaatgaattctctttttactattagatcttgtatttctgtgagctattaaaactagctgttatataacaacaaattaaatgctgttgattttcttgtttttaggggttccttcaggagtcacaagtactattgggttggaaaatctgggagaataatagtttacttactgatgaaactgctgtattatcattcattaagctggagcagatcacagtttgagggtactaccattaaagataccttcttctcagcaaatctatgataaaaaatataagtaacagaagaagaaataactgttatttgtcaagtgacaagcttttaatgtcagaatggctcacctaaagcgactagtaaaattacacat

SEQ ID NO: 7566 - DNA, 1095 bp, Homo sapiens
ccgggcccggcgcgcacccggccagcgcgccctcgccagctgcgctctgagttctgggccagctccccagaggcctaggcgccgccgccgcgagggcgcggggcagacaaaggaggcagacaaaggcgggcgcagcccagcagccgtgcgggcaccgggcgaggcaggcccactcctcccggtagcgggaaggatgaccacgctcacacgacaagacctcaactttggccaagtggtggccgatgtgctctgcgagttcctggaggtggctgtgcatctcatcctctacgtgcgcgaggtctaccccgtgggcatcttccagaaacgcaagaagtacaacgtgccggtccagatgtcctgccacccggagctgaatcagtatatccaggacacgctgcactgcgtcaagccactcctggagaaggtgagggtgcactgggctccccagccatctcaccccatgctcacccccgtccctgtgtgctcacagtccaactctgggatggggtgaagctaggactctgtggggtcttcatggctccaatacccagaagcctgttccctgcactctggagaccatcccaacccaggggcaggccccaaggcatgcgggccatgttcagggtgccttgggcctgggagcccgggttggagctggctctaagtaggggctgccccagagggttcggggttcttctcacatccgtcccctgttctccacgctaaacgttctgtctgagctgagcccctcagggtttcttccccatctagtcctgatctcagacttcctgggaccttccctatggggcccgggcattctctcagcctacaccactcatgctggagggtgccggcttctcaaactcgctatctggcctcttggggacccccagcctagcagctgagcagggctgtgagtgggccgtttctcctccttccttgggcaagggggtggaggcagggtggtgtagtcggggtggggtgcctggctctgcagtgggggttcctctctttgcagaatgatgtggagaaagtggtggtggtgattttggataaagagcaccgcccagtggagaaattcgtctttgagatcac

SEQ ID NO: 7567 - DNA, 1943 bp, Homo sapiens
cctggcggccgcgcagcaggtgcaggggcgcagagcccgggctcgccttggtacagacgagcgggccccggccttggcgccttcagtttccttccagtttttattttcgctgtgtctacagagcagatgacaccaatttggaaacccgcgagagtgggtagagctaagatagtcttgctgtagtagctgtgatattagatgctcggccatgacttagaggtgtttatttaaggactgtgaatgactcggtgatttcggaaaagcttggcttagatgaacggacatacacaggggagacagccctaagattgtcactgctgttccaagggcacacgcagagggatttggaattcctggagagttgcctttgtgagaagctggaaatatttctttcaattccatctcttagttttccataggaacatcaagaaatcatgaacaactttggtaatgaagagtttgactgccacttcctcgatgaaggttttactgccaaggacattctggaccagaaaattaatgaagtttcttcttctgatgataaggatgccttctatgtggcagacctgggagacattctaaagaaacatctgaggtggttaaaagctctccctcgtgtcacccccttttatgcagtcaaatgtaatgatagcaaagccatcgtgaagacccttgctgctaccgggacaggatttgactgtgctagcaagactgaaatacagttggtgcagagtctgggggtgcctccagagaggattatctatgcaaatccttgtaaacaagtatctcaaattaagtatgctgctaataatggagtccagatgatgacttttgatagtgaagttgagttgatgaaagttgccagagcacatcccaaagcaaagttggttttgcggattgccactgatgattccaaagcagtctgtcgtctcagtgtgaaattcggtgccacgctcagaaccagcaggctccttttggaacgggcgaaagagctaaatatcgatgttgttggtgtcagcttccatgtaggaagcggctgtaccgatcctgagaccttcgtgcaggcaatctctgatgcccgctgtgtttttgacatgggggctgaggttggtttcagcatgtatctgcttgatattggcggtggctttcctggatctgaggatgtgaaacttaaatttgaagagatcaccggcgtaatcaacccagcgttggacaaatactttccgtcagactctggagtgagaatcatagctgagcccggcagatactatgttgcatcagctttcacgcttgcagttaatatcattgccaagaaaattgtattaaaggaacagacgggctctgatgacgaagatgagtcgagtgagcagacctttatgtattatgtgaatgatggcgtctatggatcatttaattgcatactctatgaccacgcacatgtaaagccccttctgcaaaagagacctaaaccagatgagaagtattattcatccagcatatggggaccaacatgtgatggcctcgatcggattgttgagcgctgtgacctgcctgaaatgcatgtgggtgattggatgctctttgaaaacatgggcgcttacactgttgctgctgcctctacgttcaatggcttccagaggccgacgatctactatgtgatgtcagggcctgcgtggcaactcatgcagcaattccagaaccccgacttcccacccgaagtagaggaacaggatgccagcaccctgcctgtgtcttgtgcctgggagagtgggatgaaacgccacagagcagcctgtgcttcggctagtattaatgtgtagatagcactctggtagctgttaactgcaagtttagcttgaattaagggatttggggggaccatgtaacttaattactgctagttttgaaatgtctttgtaagagtagggtcgccatgatgcagc

SEQ ID NO: 7568 - DNA, 922 bp, Homo sapiens; identical to SEQ ID NO: 6503

SEQ ID NO: 7569 - DNA, 1617 bp, Homo sapiens
actgcagctctcttcattctgccaaccttttccaactccatgatgatcctgcaggtttcagggggcccctggacagtggctctgacagcattactgatggtgctgctcatatctgtggtccagagcagggccactccagagaattccgtctaccaggaacggcaggaatgctatgcgttcaatgggactcagcgcgttgtggacgggctcatctacaaccgggaggaatacgtgcattttgacagcgcagtgggggagttcctagcagtgatggagctggggcggcccataggcgagtacttcaatagccagaaggactttatggaacggaagcgagccgaggtggacaaggtgtgcagacacaagtacgagctgatggagccactcatccggcagcgccgaggccacaagtgccagcagctgcacagatacttctctgtttagccagtaagtaatctacagcaatcctactattaagcataactttcacaaaagaatgtaaaatctgttgtgtaaccatcgcccttacagtagactctgtttagagcctatcatgagggatacatttctaatcattgcctgttttactccaaatcatggtaaaaaggacctaaggaaaaatgcccttctagaagactgaaggcctcctggcaatgttctctttaacccatgatgtggaataggggagtgaatcaatgttctgtttctgactgattatgaggcaacctatgtaccattaaaatttctcacctacactgggccttcatctttcatctatcaaggtgtgaggttatccatgtataaggctggctgcaaaacccttcaccaataaaagtatacctaccccataagtgcacacaacagacccccttttcacttctactgttcatagaggcatcagcaagggaaaaaatactcagagataagagcctccatatagcagagaagtcttgatctgtgatcttggtgaaagctgttcacatcaaggataccatcttcttctgggaagaaacttccctggttagctttaccttacgggttccaatgggtgtatatttccaagaatgtggagggatccttctcagttgtgagatcatgaagccaaagttcacggttctgatgtttactgcagtgtggatggcaagggcagtctttctctgatgttctcagaagatccaatcttcaggttctagattgtgaaggggttgattgtcctcagtcagtgaaccataaaaagctttctttacctggtgaaaatacactgtgaaataataatctactgttataacatcagttcacttgtataggaaagcttttacacaaccagaaaacatgcattgaaaatgacaattgactgaaatctcttcataaatgtttaaatggctcatgaggtagcagaatgtacctgaagctttgattgtcttcccaggaatatgggtttggcaaaccaaacattggtcataaactattttagcaatttagaagtcaccacaccaatatgcatttaacttggatcattttatcttttccatgatgagtcatggaatgcagaactttaaattataaaagctttaaaagctcaggaaggataaggcagccaccttggttctccatgag

SEQ ID NO: 7570 - DNA, 399 bp, Homo sapiens; identical to SEQ ID NO: 491

SEQ ID NO: 7571 - DNA, 1138 bp, Homo sapiens
ccggggggtcagggtcccagatgcacaggaggagaagcaggagctgtcgggaagatcagaagccagtcatggatgaccagcgcgaccttatctccaacaatgagcaactgcccatgctgggccggcgccctggggccccggagagcaagtgcagccgcggagccctgtacacaggcttttccatcctggtgactctgctcctcgctggccaggccaccaccgcctacttcctgtaccagcagcagggccggctggacaaactgacagtcacctcccagaacctgcagctggagaacctgcgcatgaagcttcccaagcctcccaagcctgtgagcaagatgcgcatggccaccccgctgctgatgcaggcgctgcccatgggagccctgccccaggggcccatgcagaatgccaccaagtatggcaacatgacagaggaccatgtgatgcacctgctccagagtcactggaactggaggacccgtcttctgggctgggtgtgaccaagcaggatctgggcccagtccccatgtgagagcagcagaggcggtcttcaacatcctgccagccccacacagctacagctttcttgctcccttcagcccccagcccctcccccatctcccaccctgtacctcatcccatgagaccctggtgcctggctctttcgtcacccttggacaagacaaaccaagtcggaacagcagataacaatgcagcaaggccctgctgcccaatctccatctgtcaacaggggcgtgaggtcccaggaagtggccaaaagctagacagatccccgttcctgacatcacagcagcctccaacacaaggctccaagacctaggctcatggacgagatgggaaggcacagggagaagggataaccctacacccagaccccaggctggacatgctgactgtcctctcccctccagcctttggccttggcttttctagcctatttacctgcaggctgagccactctcttccctttccccagcatcactccccaaggaagagccaatgttttccacccataatcctttctgccgacccctagttccctctgctcagccaagcttgttatcagctttcagggccatggttcacattagaataaaaggtagtaattagaaca

SEQ ID NO: 7572 - DNA, 3960 bp, Homo sapiens
aaaatgccgccagcctggagcggggaatccatggaccgtggggttgtggggttggggagcacgaaaacccagagaggggctagagctccacctccccagaccgccgaggggcgagagggcgcgccgggggccgtggttgccatggctcctggtagcggagcccggggggctggagatgccggtcgcggatggtcccttcttcctctttgtgcctctctctttctctcgctttttttttttttttggagtgtgagtgtgcgtggggaggcagcacggagaaagtgattaatttggggagcagggattggagccgggaggctggggaaagccagcccctccgttcccactctccgggctcgctgcgagccacagtgtctcagccaggggcagggccggggaactcctgcgaaaaaccacgggccggaggagcagcagccgcgcgggcccaggtgctgtaaactgcaaaccataatcctgtcttaatactgcaaacaaatcatagtggaactaaggggaacttaatttactgtttccaggttaactaaggtctcagctgtaaaccaaaagtgagaggagacattaagattttcattcttaccgggttgtcttcttcctgaagagcaatggagccgcttttacttggaagaggactaatcgtatatctaatgttcctcctgttaaaattctcaaaagcaattgaaataccatcttcagttcaacaggttccaacaatcataaaacagtcaaaagtccaagttgcctttcccttcgatgagtattttcaaattgaatgtgaagctaaaggaaatccagaaccaacattttcgtggactaaggatggcaaccctttttatttcactgaccatcggataattccatcgaacaattcaggaacattcaggatcccaaacgaggggcacatatctcactttcaagggaaataccgctgctttgcttcaaataaactgggaatcgctatgtcagaagaaatagaatttatagttccaagtgttccaaaattcccaaaagaaaaaattgaccctcttgaagtggaggagggagatccaattgtcctcccatgcaatcctcccaaaggcctcccacctttacacatttattggatgaatattgaattagaacacatcgaacaagatgaaagagtatacatgagccaaaagggagatctatacttcgcaaacgtggaagaaaaggacagtcgcaatgactactgttgctttgctgcatttccaagattaaggactattgtacagaaaatgccaatgaaactaacagttaacagttcaaattccatcaagcaaagaaaacccaaactgctgttgcctcccactgagagtggcagtgagtcttcaattaccatcctcaaaggggaaatcttgctgcttgagtgttttgctgaaggcttgccaactccacaggttgattggaacaaaattggtggtgacttaccaaaggggagagaaacaaaagaaaattatggcaagactttgaagatagagaatgtctcctaccaggacaaaggaaattatcgctgcacagccagcaatttcttgggaacagccactcacgattttcacgttatagtagaagagcctcctcgctggacaaagaagcctcagagtgctgtgtatagcaccggaagcaatggcatcttgttatgtgaggctgaaggagaacctcaacccacaatcaagtggagagtcaatggctccccagttgacaatcatccatttgctggtgatgttgtcttccccagggaaatcagttttaccaaccttcaaccaaatcatactgctgtgtaccagtgtgaagcctcaaatgtccatggaactatccttgccaatgccaatattgatgttgtggatgtccgtccattgatacaaaccaaagatggagaaaattacgctacagtggttgggtacagtgctttcttacattgcgagttctttgcttcacctgaggcagtcgtgtcctggcagaaggtggaagaagtgaaacccctggagggcaggcggtatcatatctatgaaaatggcacattgcagatcaacagaaccaccgaagaagatgctgggtcttactcatgttgggtagaaaatgctataggaaaaactgcagtcacagccaatttggatattagaaatgctacaaaacttagagtttctcctaagaatcctcgtatccccaaattgcatatgcttgaattacattgtgaaagcaaatgtgactcacatttgaaacacagtttgaagttgtcctggagtaaagatggagaagcctttgaaattaatggcacagaagatggcaggataattattgatggagctaatttgaccatatctaatgtaactttagaggaccaaggtatttactgctgttcagctcatactgctctagacagtgctgccgatataactcaagtaactgttcttgatgttccggatccaccagaaaaccttcacttgtctgaaagacagaacaggagtgttcggctgacctgggaagctggagctgaccacaacagcaatattagcgagtatattgttgaatttgaaggaaacaaagaagagcctggaaggtgggaggaactgaccagagtccaaggaaagaaaaccacagttatcttacctttggctccatttgtgagataccagttcagggtcatagccgtgaacgaagtagggagaagtcagcctagccagccgtcagaccatcatgaaacaccaccagcagctccagataggaatccacaaaacataagggttcaagcctctcaacccaaggaaatgattataaagtgggagcctttgaaatccatggagcagaatggaccaggcctagagtacagagtgacctggaagccacagggagccccagtggagtgggaagaagaaacagtcacaaaccacacattgcgggtgatgacgcctgctgtctatgccccttatgatgtcaaggtccaggctatcaatcaactaggatctgggcctgaccctcagtcagtgactctctattctggagaagactatcctgatacagctccagtgatccatggggtggacgttataaacagtacattagttaaagttacctggtcaacagttccaaaggacagagtacatggacgtctgaaaggctatcagataaattggtggaaaacaaaaagtctgttggatggaagaacacatcccaaagaagtgaacattctaagattttcaggacaaagaaactctggaatggttccttccttagatgcctttagtgaatttcatttaacagtcttagcctataactctaaaggagctggtcctgaaagtgagccttatatatttcaaacaccagaaggagtacctgaacagccaacttttctaaaggtcatcaaagttgataaagacactgccactttatcttggggactacctaagaaattaaatggaaacttaactggctatcttttgcaatatcagataataaatgacacctacgagattggagaattaaatgatattaacattacaactccatcaaagcccagctggcacctctcaaacctgaatgcaactaccaagtacaaattctacttgagggcttgcacttcacagggctgtggaaaaccgatcacggaggaaagctccaccttaggagaagggagtaaaggtatcgggaagatatcaggagtaaatcttactcaaaagactcacccaatagaggtatttgagccgggagctgaacatatagttcgcctaatgactaagaattggggcgataatgatagcatttttcaagatgtaattgagacaagagggagagaatatgctggtttatatgatgacatctccactcaaggctggtttattggactgatgtgtgcgattgctcttctcacactactattattaactgtttgctttgtgaagaggaatagaggtggaaagtactcag

SEQ ID NO: 7573 - DNA, 6949 bp, Homo sapiens
gaccgttgcttggcagacactggatggttatgagcctgaacaagctgaaaaggggcaggaaaagaagtggaggcagcattcttcctatttaaagctgcatcgcttgaaaaaagttttcgcagactgtgctggagctggtgctgaaaaagggggtttgcagaggctgccctggggctggtgctgaaagaagagcccacagctgacttcatggtgctacaataacctcagaatctacttttcactctcaggagaacccacatgtctaatatttagacatgatggcaaactgggcggaagcaagacctctcctcattcttattgttttattagggcaatttgtctcaataaaagcccaggaagaagacgaggatgaaggatatggtgaagaaatagcctgcactcagaatggccagatgtacttaaacagggacatttggaaacctgccccttgtcagatctgtgtctgtgacaatggagccattctctgtgacaagatagaatgccaggatgtgctggactgtgccgaccctgtaacgccccctggggaatgctgtcctgtctgttcacaaacacctggaggtggcaataccaattttggtagaggaagaaagggacaaaagggagaaccaggattagtgcctgttgtaacaggcatacgtggtcgtccaggaccggcaggacctccaggatcacagggaccaagaggagagcgagggccaaaaggaagacctggccctcgtggacctcagggaattgatggagaaccaggtgttcctggtcaacctggtgctccaggacctcctggacatccgtcccacccaggacccgatggcttgagcaggccgttttcagctcaaatggctgggttggatgaaaaatctggacttgggagtcaagtaggactaatgcctggctctgtgggtcctgttggcccaaggggaccacagggtttacaaggacagcaaggtggtgcaggacctacaggacctcctggtgaacctggtgatcctggaccaatgggtccgattggttcacgtggaccagagggccctcctggtaaacctggggaagatggtgaacctggcagaaatggaaatcctggtgaagtgggatttgcaggatctccgggagctcgtggatttcctggggctcctggtcttccaggtctgaagggtcaccgaggacacaaaggtcttgaaggccctaaaggtgaagttggagcacctggttccaagggtgaagctggccccactggtccaatgggtgccatgggtcctctgggtccgaggggaatgccaggagagagagggagacttgggccacagggtgctcctggacaacgaggtgcacatggtatgcctggaaaacctggaccaatgggtcctcttgggataccaggctcttctggttttccaggaaatcctggaatgaagggagaagcaggtcctacaggggcgcgaggccctgaaggtcctcaggggcagagaggtgaaactgggcccccaggtccagttggctctccaggtcttcctggtgcaataggaactgatggtactcctggtgccaaaggcccaacgggctctccaggtacctctggtcctcctggctcagcagggcctcctggatctccaggacctcagggtagcactggtcctcagggaattcgaggccaaccgggtgatccaggagttccaggtttcaaaggagaagctggcccaaaaggggaaccagggccacatggtattcagggtccgataggcccacccggtgaagaaggcaaaagaggtcccagaggtgacccaggaacagttggtcctccagggccagtgggagaaaggggtgctcctggcaatcgtggttttccaggctctgatggtttacctgggccaaagggtgctcaaggagaacggggtcctgtaggttcttcaggacccaaaggaagccagggggatccaggacgtccaggggaacctgggcttccaggtgctcggggtttgacaggaaatcctggtgttcaaggtcctgaaggaaaacttggacctttgggtgcgccaggggaagatggccgtccaggtcctccaggctccataggaatcagagggcagcccgggagcatgggccttccaggccccaaaggtagcagtggtgaccctgggaaacctggagaagcaggaaatgctggagttcctgggcagaggggagctcctggaaaagatggtgaagttggtccttctggtcctgtgggcccgccgggtctagctggtgaaagaggagaacaaggacctccaggccccacaggttttcaggggcttcctggtcctccagggcctcctggagaaggtggaaaaccaggtgatcaaggtgttcctggagatcccggagcagttggcccgttaggacctagaggagaacgaggaaatcctggggaaagaggagaacctgggataactggactccctggtgagaagggaatggctggaggacatggtcctgatggcccaaaaggcagtccaggtccatctgggacccctggagatacaggcccaccaggtcttcaaggtatgccgggagaaagaggaattgcaggaactcctggccccaagggtgacagaggtggcataggagaaaaaggtgctgaaggcacagctggaaatgatggtgcaagaggtcttccaggtcctttgggccctccaggtccggcaggtcctactggagaaaagggtgaacctggtcctcgaggtttagttggccctcctggctcccggggcaatcctggttctcgaggtgaaaatgggccaactggagctgttggttttgccggaccccagggtcctgacggacagcctggagtaaaaggtgaacctggagagccaggacagaagggagatgctggttctcctggaccacaaggtttagcaggatcccctggccctcatggtcctaatggtgttcctggactaaaaggtggtcgaggaacccaaggtccgcctggtgctacaggatttcctggttctgcgggcagagttggacctccaggccctgctggagctccaggacctgcgggacccctaggggaacccgggaaggagggacctccaggtcttcgtggggaccctggctctcatgggcgtgtgggagatcgaggaccagctggcccccctggtggcccaggagacaaaggggacccaggagaagatgggcaacctggtccagatggcccccctggtccagctggaacgaccgggcagagaggaattgttggcatgcctgggcaacgtggagagagaggcatgcccggcctaccaggcccagcgggaacaccaggaaaagtaggaccaactggtgcaacaggagataaaggtccacctggacctgtggggcccccaggctccaatggtcctgtaggggaacctggaccagaaggtccagctggcaatgatggtaccccaggacgggatggtgctgttggagaacgtggtgatcgtggagaccctgggcctgcaggtctgccaggctctcagggtgcccctggaactcctggccctgtgggtgctccaggagatgcaggacaaagaggagatccgggttctcggggtcctataggaccacctggtcgagctgggaaacgtggattacctggaccccaaggacctcgtggtgacaaaggtgatcatggagaccgaggtgacagaggtcagaagggccacagaggctttactggtcttcagggtcttcctggccctcctggtccaaatggtgaacaaggaagtgctggaatccctggaccatttggcccaagaggtcctccaggcccagttggtccttcaggtaaagaaggaaaccctgggccacttgggccaattggacctccaggtgtacgaggcagtgtaggagaagcaggacctgagggccctcctggtgagcctggcccacctggccctccgggtccccctggccaccttacagctgctcttggggatatcatggggcactatgatgaaagcatgccagatccacttcctgagtttactgaagatcaggcggctcctgatgacaaaaacaaaacggacccaggggttcatgctaccctgaagtcactcagtagtcagattgaaaccatgcgcagccccgatggctcgaaaaagcacccagcccgcacgtgtgatgacctaaagctttgccattccgcaaagcagagtggtgaatactggattgatcctaaccaaggatctgttgaagatgcaatcaaagtttactgcaacatggaaacaggagaaacatgtatttcagcaaacccatccagtgtaccacgtaaaacctggtgggccagtaaatctcctgacaataaacctgtttggtatggtcttgatatgaacagagggtctcagttcgcttatggagaccaccaatcacctaatacagccattactcagatgacttttttgcgccttttatcaaaagaagcctcccagaacatcacttacatctgtaaaaacagtgtaggatacatggacgatcaagctaagaacctcaaaaaagctgtggttctcaaaggggcaaatgacttagatatcaaagcagagggaaatattagattccggtatatcgttcttcaagacacttgctctaagcggaatggaaatgtgggcaagactgtctttgaatatagaacacagaatgtggcacgcttgcccatcatagatcttgctcctgtggatgttggcggcacagaccaggaattcggcgttgaaattgggccagtttgttttgtgtaaagtaagccaagacacatcgacaatgagcaccaccatcaatgaccaccgccattcacaagaactttgactgtttgaagttgatcctgagactcttgaagtaatggctgatcctgcatcagcattgtatatatggtcttaagtgcctggcctccttatccttcagaatatttattttacttacaatcctcaagttttaattgattttaaatatttttcaatacaacagtttaggtttaagatgaccaatgacaatgaccacctttgcagaaagtaaactgattgaataaataaatctccgttttcttcaatttatttcagtgtaatgaaaaagttgcttagtatttatgaggaaattcttcttcctggcaggtagcttaaagagtggggtatatagagccacaacacatgtttattttgcttggctgcagttgaaaaatagaaattagtgcccttttgtgacctctcattccaagattgtcaattaaaaatgagtttaaaatgtttaacttgtgatcgagacctacatgcatgtcttgatattgtgtaactataatagagactctttaaggagaatcttaaaaaaaaaaaaacgtttctcactgtcttaaatagaatttttaaatagtatatattcagtggcattttggagaacaaagtgaatttacttcgacttcttaaatttttgtaaaagactataagtttagacatctttctcattcaaatttaaagatatctttctcctcttgatcaatctatcaatattgatagaagtcacactagtatataccatttaatacatttacactttcttatttaagaagatattgaatgcaaaataattgacatatagaactttacaaacatatgtccaaggactctaaattgagactcttccacatgtacaatctcatcatcctgaagcctataatgaagaaaaagatctagaaactgagttgtggagctgactctaatcaaatgtgatgattggaattagaccatttggcctttgaactttcataggaaaaatgacccaacatttcttagcatgagctacctcatctctagaagctgggatggacttactattcttgtttatattttagatactgaaaggtgctatgcttctgttattattccaagactggagataggcagggctaaaaaggtattattatttttcctttaatgatggtgctaaaattcttcctataaaattccttaaaaataaagatggtttaatcactaccattgtgaaaacataactgttagacttcccgtttctgaaagaaagagcatcgttccaatgcttgttcactgttcctctgtcatactgtatctggaatgctttgtaatacttgcatgcttcttagaccagaacatgtaggtccccttgtgtctcaatactttttttttcttaattgcatttgttggctctattttaatttttttcttttaaaataaacagctgggaccatcccaaaagacaagccatgcatacaactttggtcatgtatctctgcaaagcatcaaattaaatgcacgcttttgtcatgtcagtggtttttgttttgtgaaattcctttgaccatattagatctatttcatttccaatagtgaaaaggagatgtggtggtatactttgtttgccatttgtttaaaagatacaacggataccttctatcatgtatgtactggcttataaatgaaaatctatctacaacattacccacaaaggcaacatgacaccaattatcactgcctctgcccttaaaaatgtcagagtagtattattgataaaaagggcaagcaatagatttttcatgactgaataaactgtaataataaaacatatgtctcaaagtgtatcacatatgaatttagcctaattgttttcagtttcattctcaatatttagtttacaacatcattttcccctaaactggttatattttgacctgtatatcttaaatttgagtatttatatgcctaaatacatgtgtgagttttgtttgacttccaagtccaaactataagattatataagttcatatagatgaatcagaaatatgtggtaatactattaagtcacaaacactaacaatttccaactatagaaataacagttcttatttggattttgggaatgctaccaataaaagcctgcccagaccatt

SEQ ID NO: 7574 - DNA, 5876 bp, Homo sapiens
ttaagtgtaaagaataagggagttaacgccaaaaataaatgaacaaaaatgccgtcatgtctggcagctcaggtggcaaatcttccaaaagactacatgataaccctcaaatatgtccccgggatggatgttttgccaagtcattgttggataagcgagatggtagtacaattgtcagacagcttgactgatcttctggacaagttttcaaatatttctgaaggcttgagtaattattccatcatagacaaacttgtgaatatagtggatgaccttgtggagtgcgtgaaagaaaactcatctaaggatctaaaaaaatcattcaagagcccagaacccaggctctttactcctgaagaattctttagaatttttaatagatccattgatgccttcaaggactttgtagtggcatctgaaactagtgattgtgtggtttcttcaacattaagtcctgagaaagattccagagtcagtgtcacaaaaccatttatgttaccccctgttgcagccagctcccttaggaatgacagcagtagcagtaataggaaggccaaaaatccccctggagactccagcctacactgggcagccatggcattgccagcattgttttctcttataattggctttgcttttggagccttatactggaagaagagacagccaagtcttacaagggcagttgaaaatatacaaattaatgaagaggataatgagataagtatgttgcaagagaaagagagagagtttcaagaagtgtaattgtggcttgtatcaacactgttactttcgtacattggctggtaacagttcatgtttgcttcataaatgaagcagctttaaacaaattcatattctgtctggagtgacagaccacatctttatctgttcttgctacccatgactttatatggatgattcagaaattggaacagaatgttttactgtgaaactggcactgaattaatcatctataaagaagaacttgcatggagcaggactctattttaaggactgcgggacttgggtctcatttagaacttgcagctgatgttggaagagaaagcacgtgtctcagactgcatgtaccatttgcatggctccagaaatgtctaaatgctgaaaaaacacctagctttattcttcagatacaaactgcagcctgtagttatcctggtctctgcaagtagatttcagcttggatagtgagggtaacaatttttctcaaagggatctggaaaaaatgtttaaaactcagtagtgtcagccactgtacagtgtagaaagcagtgggaactgtgattggatttggcaacatgtcagctttatagttgccgattagtgatatgggtctgatttcgatctcttcctgatgtaaaccatgctcacccatatcccactatacaaatgcaaatggttgcctggttccatttatgcaagggagccagtactgaattatgccttggcagaggggagactccaaaagagtcatcgcaggaagaagttaagaacactgaacatcagaacagtctgccaagaaggacattggcatcctgggaaagtccgccttttcccttgaccactatagggtgtataaatcgtgtttgcaaaatgtgttatgatgtgtttatattctaaaactattacagagctatgtaaagggacttaggagaaaatgctgaatgtaagatggtcccatttcaatttccaccatgggagagcctaaaaataaattatgacatttagtatctaaggttagaaaaccacgcccacatgctaatatgggtgttgaaaactaggttacttataatgcaaggaatcaggaaactttagttatttatagtataatcaccattatctgtttaaaggatccatttagttaaaatcgggcactctatattcattaaggtttatgaattaaaaagaaagctttatgtagttatgcatgtcagtttgctatttaaaatgtgtgacagtgtttgtcatattaagagtgaatttggcaggaattcccaagatggacattgtgcttttaaactagaacttgtaagacattatgtgaatatcccttgccaattttttttataataagaaaacatctgactaaagtcaaagaatgatttcttatggtttattttgatgaaagttcttttaacatgtcttgaatgtacacataaaggaatccaaagctttccattctaacttaatctttgtgataacattattgccatgttctacaaccgtaagatgacagttttcaatgtagtgacacaaaagggcatgaaaaactaactgctagctttcctttcatttcaaaagtccaagaatttctagtatatttggattttagcttctgttcaaagcaaatccagatgcaactccagtaagtggcctttgctcttttttgtaccaaagagcccagatgattcctacagtccctttcttctctaacatgctgtggttccttaaatatgagtaatttctctaagatataacccaggtgctttgagaagctgcattaaggtgttcaggccctcagatatcacatggtacacttgattagtaataaaaccagagatcaatttaaattgctgataggtcctgtctcagtgtgtggcattgactgttttcaggaaaatagatacagattaatatgagttatgcgtgtaggttgtgtatagattgagaagatagatacttctcaatctagtagtttgatttatttaaccaatggtttcagtttgcttgagcatatgaaaatcctgcttaatgtgcttaagagtataataaatgtgtacttttgtcctcaaacctagtagctgggttttaacactcatggacatggtcttaatcaatggagttaaataaacaaattcagcaagttattaaatctgacatggtaggagaggggagatgtgtcctgcttattaaatgtgttggtccattgaaagttacatggattgccaatttttaaaacactaaagttgaataaaatgcatgaacaatagaaaaatgctgaacattattttggatgctagctgcttggacattaactgtgttatttctgctttgagatgaaaatatatatttatctttgcttattttatcccagatgtgttctgaatatccttcttcataaatcatggaaaactcactgctgagatagtaaaccatgaaatcgccttttcagttggtgccatgtatctgacagttccatcttggaaggtttcaaaattaccttttaaaatgatctcagaagtctgtagattctcaatgatactgaaagctttgcacctctttggtagaaaccaggtctatttagaaaatggctttatgataaatgttgcctcctgagtgataatgaagtgttcctggatattgtattgtaatttaatgtgcttaccacactgccacattttaatgagtcagagaaaaattaatttttcttcaatacaataatagaacaagtagcctattctcttaaaaagtatgtgaaaagaaaattatgaaaaaatatgcatacctaatgaagtattggttttagtaagaattaaatacatttcattgagctttaaagtactttggagaaactttggggcacgttttcctactctaattcaactaaagttataaataaagagaaaaactcattcagaaatcatggattttaaaaatattttactgcagccaagttttcatttcaaaatgtaatttcagtttggagcttttaggcattatgtatatttaaaaaatatattcttcaaaaatgcattttggcatggtgggatggatgttgcaaaagatatccggagcctccagtctgtcattaactgatatggtaaatcacctctcttctttgggtctcaattttttatttatctatatggtaaactcagagatcactccttaggggtgagtcctattgcaatatgaccgacaaagaagacaaaatagcattgaaactaacccatacaaaatatccaactctggattctgtgaataagtatcttgaccataaaaagtcattgctgttcttgtttctaatgtaaatagtgtccattagtaaaagtgaaattcagtcttaagtagggtgaattggatcaccatttacacaagagatggctttttcctttgcttgaataaacattttggatcacctccaaagaatgaaaaccagtagtacgttttagtcatattagtcaggatgagaaactataagatgtgtgtaacatttggaaatgcaccaaagtgagcgtttaaatcttctcattttattgaaaactaagagcagaaaatgtaaaatgctcatgaaggttttgaatgccaaaagatattttagaatcaatttataaaggggtaattcattaattacactttaaaattggaaagtgggataagaaatctaaagtaaaccagcttatctttgaaacaatattattttgaaattggctttaaaataaaaccattcagattgaaattctaattagctcatttgtggagtttgatcacacaattcataatgttgctgctttccattaactagtcttgaaatgcctttgtttgtaaaaataaaataatggtactttcattttataacaaggtgtttttttcaagaaataatccatgctaaaatggatatttgtgatcctgaaatgtttactaagcattgtaaatttatttataactgccatctccaactacatccttatgatgtttttaacaataaaattaaaacaactgttaaactaaaaaccacaccgttttccagtacttgatctctgagctacaatactcactaaatataattttccaatcaaaatattctattctatattctaagggttaatatgtgattatagtgtccacttgccaccatttttttaaatcaatggacttgaaaagtattaatttagatggatgcgcagatataccctcagttcagtcatagattggagtttgcatataataatgtaaatgtatgtcgacactattctaaatagttctattatgactgaaatttaattaaataaaaaaggttgtaaaatgtgatgtgtatgtgtatatactgtatgtgtactttttaaaataggtgtatgtcccaacccttttttatacaggtttgaatttaaaattacatgatatatacatatactttattgttctaaataaagaattttatgcactctcataaatttaccctgtcattttatatcttaaggttatcacatatgtctacaacatggttgaacatttattaagctacagtcaaaattttctgtggaaacttttgtcattaatctagattttattaagctacagtcaaaattttctatggaaacttttgtcattaatctagattttgttgaaatatggacacaaggggataagaaattatttaaattcaataaatatttattgattactaaaataagtaatcaaggaaaataaaaaatgaattaacacgacgtttgctttcaagagatttataacttgtctggagaaaagaaatgcaatagatatatagaaaagcactataatagatatagatacagaaaatagatacagatatagaaaagcagtataatatgtatagtccctgaagtaaatacctacatgcaaaacagaggtccagttaatgtgcttagggcatgcaggaaggagaaatggatacagaataagggagactgtggaggaattgatgtttgggctaatacttagaaggatgagacaaatttttatagtgagaattatgcccagtcagggcagcattttccatagaaagaagttataaaatttctaagcttattttaccaactcaaacaggtatgtccttagcatacaccaaataaaaagacacacggagagataagacc

SEQ ID NO: 7575 - DNA, 694 bp, Homo sapiens
ggagtgctctgcagatgtcccagaaggcgcatggaagtccttctgacccatattgtcttcaaaacagtcgtaggaaggatggagaagcctggcctggcactggctctcaggaaagtcattgatggaattcgtgtgtctgtgtggggctcactgtgagtggggggtgacttcctttgagtaggatggacatttccccctgctctaaaaggagagtcagttcctcgttctctaatatacagttacctgactgacattgaccgcatcgccacaccatcattcgtgcctacccaacaagatgtgcttcgcgtccgagtgcccaccaccggcatcattgagtatccatttgacttggaaaacatcatctttcggatggtggatgttggtggccaacgatcggaaagacggaagtggattcactgctttgagagtgtcacctccattattttcttggttgctctgagtgaatatgaccaggtcctggctgagtgtgacaacgagaatcgcatggaagagagcaaagccttatttaaaaccatcatcacctacccctggtttctgaattcgtctgtgattttattcttgaacaagaaggatcttttggaagagaaaatcatgtactctcatctaattagctatttcccagaatacacaggaccgaaacaggatgtcagagctgccagagactttatcctga

SEQ ID NO: 7576 - DNA, 2379 bp, Homo sapiens
agccccgccctgccccgcgccgccaagcggttcccgccctcgcccagcgcccaggtagctgcgaggaaacttttgcagcggctgggtagcagcacgtctcttgctcctcagggccactgccaggcttgccgagtcctgggactgctctcgctccggctgccactctcccgcgctctcctagctccctgcgaagcaggatggccgggaccgtgcgcaccgcgtgcttggtggtggcgatgctgctcagcttggacttcccgggacaggcgcagcccccgccgccgccgccggacgccacctgtcaccaagtccgctccttcttccagagactgcagcccggactcaagtgggtgccagaaactcccgtgccaggatcagatttgcaagtatgtctccctaagggcccaacatgctgctcaagaaagatggaagaaaaataccaactaacagcacgattgaacatggaacagctgcttcagtctgcaagtatggagctcaagttcttaattattcagaatgctgcggttttccaagaggcctttgaaattgttgttcgccatgccaagaactacaccaatgccatgttcaagaacaactacccaagcctgactccacaagcttttgagtttgtgggtgaatttttcacagatgtgtctctctacatcttgggttctgacatcaatgtagatgacatggtcaatgaattgtttgacagcctgtttccagtcatctatacccagctaatgaacccaggcctgcctgattcagccttggacatcaatgagtgcctccgaggagcaagacgtgacctgaaagtatttgggaatttccccaagcttattatgacccaggtttccaagtcactgcaagtcactaggatcttccttcaggctctgaatcttggaattgaagtgatcaacacaactgatcacctgaagttcagtaaggactgtggccgaatgctcaccagaatgtggtactgctcttactgccagggactgatgatggttaaaccctgtggcggttactgcaatgtggtcatgcaaggctgtatggcaggtgtggtggagattgacaagtactggagagaatacattctgtcccttgaagaacttgtgaatggcatgtacagaatctatgacatggagaacgtactgcttggtctcttttcaacaatccatgattctatccagtatgtccagaagaatgcaggaaagctgaccaccactgaaactgagaagaaaatatggcacttcaaatatcctatcttcttcctgtgtatagggctagacttacagattggcaagttatgtgcccattctcaacaacgccaatatagatctgcttattatcctgaagatctctttattgacaagaaagtattaaaagttgctcatgtagaacatgaagaaaccttatccagccgaagaagggaactaattcagaagttgaagtctttcatcagcttctatagtgctttgcctggctacatctgcagccatagccctgtggcggaaaacgacaccctttgctggaatggacaagaactcgtggagagatacagccaaaaggcagcaaggaatggaatgaaaaaccagttcaatctccatgagctgaaaatgaagggccctgagccagtggtcagtcaaattattgacaaactgaagcacattaaccagctcctgagaaccatgtctatgcccaaaggtagagttctggataaaaacctggatgaggaagggtttgaaagtggagactgcggtgatgatgaagatgagtgcattggaggctctggtgatggaatgataaaagtgaagaatcagctccgcttccttgcagaactggcctatgatctggatgtggatgatgcgcctggaaacagtcagcaggcaactccgaaggacaacgagataagcacctttcacaacctcgggaacgttcattccccgctgaagcttctcaccagcatggccatctcggtggtgtgcttcttcttcctggtgcactgactgcctggtgcccagcacatgtgctgccctacagcaccctgtggtcttcctcgataaagggaaccactttcttatttttttctatttttttttttttgttatcctgtatacctcctccagccatgaagtagaggactaaccatgtgttatgttttcgaaaatcaaatggtatcttttggaggaagatacattttagtggtagcatatagattgtccttttgcaaagaaagaaaaaaaaccatcaagttgtgccaaattattctcctatgtttggctgctagaacatggttaccatgtctttctctctcactccctccctttctatcgttctctctttgcatggatttctttgaaaaaaaataaattgctc

SEQ ID NO: 7577 - DNA, 5244 bp, Homo sapiens
aaagtgattgattcggatactgacactgtaggatctggggagagaggaacaaaggaccgtgaaagctgctctgtaaaagctgacacagccctcccaagtgagcaggactgttcttcccactgcaatctgacagtttactgcatgcctggagagaacacagcagtaaaaaccaggtttgctactggaaaaagaggaaagagaagactttcattgacggacccagccatggcagcgtagcagccctgcgttttagacggcagcagctcgggactctggacgtgtgtttgccctcaagtttgctaagctgctggtttattactgaagaaagaatgtggcagattgttttctttactctgagctgtgatcttgtcttggccgcagcctataacaactttcggaagagcatggacagcataggaaagaagcaatatcaggtccagcatgggtcctgcagctacactttcctcctgccagagatggacaactgccgctcttcctccagcccctacgtgtccaatgctgtgcagagggacgcgccgctcgaatacgatgactcggtgcagaggctgcaagtgctggagaacatcatggaaaacaacactcagtggctaatgaagcttgagaattatatccaggacaacatgaagaaagaaatggtagagatacagcagaatgcagtacagaaccagacggctgtgatgatagaaatagggacaaacctgttgaaccaaacagcggagcaaacgcggaagttaactgatgtggaagcccaagtattaaatcagaccacgagacttgaacttcagctcttggaacactccctctcgacaaacaaattggaaaaacagattttggaccagaccagtgaaataaacaaattgcaagataagaacagtttcctagaaaagaaggtgctagctatggaagacaagcacatcatccaactacagtcaataaaagaagagaaagatcagctacaggtgttagtatccaagcaaaattccatcattgaagaactagaaaaaaaaatagtgactgccacggtgaataattcagttcttcagaagcagcaacatgatctcatggagacagttaataacttactgactatgatgtccacatcaaactctaaggaccccactgttgctaaagaagaacaaatcagcttcagagactgtgctgaagtattcaaatcaggacacaccacgaatggcatctacacgttaacattccctaattctacagaagagatcaaggcctactgtgacatggaagctggaggaggcgggtggacaattattcagcgacgtgaggatggcagcgttgattttcagaggacttggaaagaatataaagtgggatttggtaacccttcaggagaatattggctgggaaatgagtttgtttcgcaactgactaatcagcaacgctatgtgcttaaaatacaccttaaagactgggaagggaatgaggcttactcattgtatgaacatttctatctctcaagtgaagaactcaattataggattcaccttaaaggacttacagggacagccggcaaaataagcagcatcagccaaccaggaaatgattttagcacaaaggatggagacaacgacaaatgtatttgcaaatgttcacaaatgctaacaggaggctggtggtttgatgcatgtggtccttccaacttgaacggaatgtactatccacagaggcagaacacaaataagttcaacggcattaaatggtactactggaaaggctcaggctattcgctcaaggccacaaccatgatgatccgaccagcagatttctaaacatcccagtccacctgaggaactgtctcgaactattttcaaagacttaagcccagtgcactgaaagtcacggctgcgcactgtgtcctcttccaccacagagggcgtgtgctcggtgctgacgggacccacatgctccagattagagcctgtaaactttatcacttaaacttgcatcacttaacggaccaaagcaagaccctaaacatccataattgtgattagacagaacacctatgcaaagatgaacccgaggctgagaatcagactgacagtttacagacgctgctgtcacaaccaagaatgttatgtgcaagtttatcagtaaataactggaaaacagaacacttatgttatacaatacagatcatcttggaactgcattcttctgagcactgtttatacactgtgtaaatacccatatgtcctgaattcaccatcactatcacaattaaaaggaagaaaaaaactctctaagccataaaaagacatattcagggatattctgagaaggggttactagaagtttaatatttggaaaaacagttagtgcatttttactccatctcttaggtgctttaaatttttatttcaaaaacagcgtatttacatttatgttgacagcttagttataagttaatgctcaaatacgtatttcaaatttatatggtagaaacttccagaatctctgaaattatcaacagaaacgtgccattttagtttatatgcagaccgtactatttttttctgcctgattgttaaatatgaaggtatttttagtaattaaatataacttattaggggatatgcctatgtttaacttttatgataatatttacaattttataatttgtttccaaaagacctaattgtgccttgtgataaggaaacttcttacttttaatgatgaggaaaattatacatttcattctatgacaaagaaactttactatcttctcactattctaaaacagaggtctgttttctttcctagtaagatatatttttatagaactagactacaatttaatttctggttgagaaaagccttctatttaagaaatttacaaagctatatgtctcaagattcacccttaaatttacttaaggaaaaaaataattgacactagtaagtttttttatgtcaatcagcaaactgaaaaaaaaaaaagggtttcaaagtgcaaaaacaaaatctgatgttcataatatatttaaatatttaccaaaaatttgagaacacagggctgggcgcagtggctcacacctataatcccagtacattggtaggcaaggtgggcagatcacctgaggtcaggagttcaagaccagcctggacaacatggtgaaaccctgtctctactaaataatacaaaaattagccaggcgtgctggcgggcacctgtaatcccagctactcgggaggctgaggcagggagaattgcttgcaccagggaggtagaggttgcagtgagccaagatcgcaccactgcactccagccggggcaacagagcaagactccatctcaaaaaaaaaaaaaaaaaaagaaagaaaagaaaatttgagaacacagctttatactcgggactacaaaaccataaactcctggagttttaactccttttgaaattttcatagtacaattaatactaatgaacatttgtgtaaagctttataatttaaaggcaatttctcatatattcttttctgaatcatttgcaaggaagttcagagtccagtctgtaactagcatctactatatgtctgtcttcaccttacagtgttctaccattattttttctttattccatttcaaaatctaatttattttaccccaacttctccccaccacttgacgtagttttagaacacacaggtgttgctacatatttggagtcaatgatggactctggcaaagtcaaggctctgttttatttccaccaaggtgcacttttccaacaactatttaactagttaagaacctccctatcttagaactgtatctactttatatttaagaaggttttatgaattcaacaacggtatcatggccttgtatcaagttgaaaaacaactgaaaataagaaaatttcacagcctcgaaagacaacaacaagtttctaggatatctcaatgacaagagtgatggatacttaggtagggaaacgctaatgcaggaaaaactggcaacaacacaatttatatcaattctctttgtaggcaggtgataaaaaattcaaggacaaatctcattatgtcattgtgcatcatatataatctcttatgagcgagaatggggggaatttgtgtttttactttacacttcaattccttacacggtatttcaaacaaacagttttgctgagaggagcttttgtctctccttaagaaaatgtttataaagctgaaaggaaatcaaacagtaatcttaaaaatgaaaacaaaacaacccaacaacctagataactacagtgatcagggagcacagttcaactccttgttatgttttagtcatatggcctactcaaacagctaaataacaacaccagtggcagataaaaatcaccatttatctttcagctattaatcttttgaatgaataaactgtgacaaacaaattaacatttttgaacatgaaaggcaacttctgcacaatcctgtatccaagcaaactttaaattatccacttaattattacttaatcttaaaaaaaattagaacccagaacttttcaatgaagcatttgaaagttgaagtggaatttaggaaagccataaaaatataaatactgttatcacagcaccagcaagccataatctttatacctatcagttctatttctattaacagtaaaaacattaagcaagatataagactacctgcccaagaattcagtcttttttcatttttgtttttctcagttctgaggatgttaatcgtcaaattttctttggactgcattcctcactactttttgcacaatggtctcacgttctcacatttgttctcgcgaataaattgataaaaggtgttaagttctgtgaatgtctttttaattatgggcataattgtgcttgactggataaaaacttaagtccacccttatgtttataataatttcttgagaacagcaaactgcatttaccatcgtaaaacaacatctgacttacgggagctgcagggaagtggtgagacagttcgaacggctcctcagaaatccagtgacccaattctaaagaccatagcacctgcaagtgacacaacaagcagatttattatacatttattagccttagcaggcaataaaccaagaatcactttgaagacacagcaaaaagtgatacactccgcagatctgaaatagatgtgttctcagacaacaaagtcccttcagaatcttcatgttgcataaatgttatgaatatt

SEQ ID NO: 7578 - DNA, 799 bp, Homo sapiens
agtgtgaaatcttcagagaagaatttctctttagttctttgcaagaaggtagagataaagggaaggtgtgggaaggacttgtgaaatacatattcgaggaaaaactatgcacaaggccgtgcatttaaaaataaactccctaaggctggggtgaaacctgctacggtctgcgcaagttgactgttaatgaatttgattctcaggtacactttttcaaaaatggcaatggtatcagaattcctcaagcaggcctggtttattgaaaatgaagagcaggaatatgttcaaactgtgaagtcatccaaaggtggtcccggatcagcggtgagcccctatcctaccttcaatccatcctcggatgtcgctgccttgcataaggccataatggttaaaggtgtggatgaagcaaccatcattgacattctaactaagcgaaacaatgcacagcgtcaacagatcaaagcagcatatctccaggaaacaggaaagcccctggatgaaacactgaagaaagcccttacaggtcaccttgaggaggttgttttagctctgctaaaaactccagcgcaatttgatgctgatgaacttcgtgctgccatgaagggccttggaactgatgaagatactctaattgagattttggcatcaagaactaacaaagaaatcagagacattaacagggtctacagagaggaactgaagagagatctggccaaagacataacctcagacacatctggagattttcggaacgctttgctttctcttgctaagggtgaccgatctgaggactttggtg

SEQ ID NO: 7579 - DNA, 937 bp, Homo sapiens
ggttccccagaagaagggcccaggtgggtgccgtccaggggcctccctctgcctcatgtttcctgggttctcagttggttctttgcccagcatcaaagcccacaggtgccaacaggcatgatgggaggggaacctgggggtggggacttggctttccaggccctgcaggaggaggaaggccgcaccccgccagctagaggaagagcctcttccagggagcacaccccgcccctccctggtcctggctgctcaggagtgccaagaaacacaacttggacacgaaacgtggaggagtgcgggctccacggctgcagctttctcggatcttactgttggaagtgaaccaggtgtccttaggaaactctcttataaacagcgctggattttgtggctgtttccttcaggaagggaaggagtttgccgacagccagaagttgctgttcatggaaacttcggccaaactgaaccaccaggtgtcggaggtgttcaatacagtggcccaagagctactgcagagaagcgacgaggagggccaggctctacggggggatgcagctgtggctctgaacaaggggcccgcgaggcaggccaaatgctgcgcccactaggtgcagccactcctgggggctgtggggaagacaccccctgcctgggccatggccagctctaggtggattctgattcactgtcaatgctgggttgctcccgagccctagatgttcctggaagttggccccctttatgaaaaccacttcccacagccagtgggaactgccagaggaagatctggcgtcacatggctcccaggaaagtgctgtgccctatccccactgataccatctgattccccgatgcctgtgcctgttccacctggacggtggccccctcagcctggcagcctctggacagagaggaaggaaggattggaaaagtcccc

SEQ ID NO: 7580 - DNA, 4189 bp, Homo sapiens
gccatcccgcgctctgcgggctgggaggcccgggccaggacgcgagtcctgcgcagccgaggttccccagcgccccctgcagccgcgcgtaggcagagacggagcccggccctgcgcctccgcaccacgcccgggaccccacccagcggcccgtacccggagaagcagcgcgagcacccgaagctcccggctggcggcagaaaccgggagtggggccgggcgagtgcgcggcatcccaggccggcccgaacgctccgcccgcggtgggccgacttcccctcctcttccctctctccttcctttagcccgctggcgccggacacgctgcgcctcatctcttggggcgttcttccccgttggccaaccgtcgcatcccgtgcaactttggggtagtggccgtttagtgttgaatgttccccaccgagagcgcatggcttgggaagcgaggcgcgaacccggcccccgaagggccgccgtccgggagacggtgatgctgttgctgtgcctgggggtcccgaccggccgcccctacaacgtggacactgagagcgcgctgctttaccagggcccccacaacacgctgttcggctactcggtcgtgctgcacagccacggggcgaaccgatggctcctagtgggtgcgcccactgccaactggctcgccaacgcttcagtgatcaatcccggggcgatttacagatgcaggatcggaaagaatcccggccagacgtgcgaacagctccagctgggtagccctaatggagaaccttgtggaaagacttgtttggaagagagagacaatcagtggttgggggtcacactttccagacagccaggagaaaatggatccatcgtgacttgtgggcatagatggaaaaatatattttacataaagaatgaaaataagctccccactggtggttgctatggagtgccccctgatttacgaacagaactgagtaaaagaatagctccgtgttatcaagattatgtgaaaaaatttggagaaaattttgcatcatgtcaagctggaatatccagtttttacacaaaggatttaattgtgatgggggccccaggatcatcttactggactggctctctttttgtctacaatataactacaaataaatacaaggcttttttagacaaacaaaatcaagtaaaatttggaagttatttaggatattcagtcggagctggtcattttcggagccagcatactaccgaagtagtcggaggagctcctcaacatgagcagattggtaaggcatatatattcagcattgatgaaaaagaactaaatatcttacatgaaatgaaaggtaaaaagcttggatcgtactttggagcttctgtctgtgctgtggacctcaatgcagatggcttctcagatctgctcgtgggagcacccatgcagagcaccatcagagaggaaggaagagtgtttgtgtacatcaactctggctcgggagcagtaatgaatgcaatggaaacaaacctcgttggaagtgacaaatatgctgcaagatttggggaatctatagttaatcttggcgacattgacaatgatggctttgaagatgttgctatcggagctccacaagaagatgacttgcaaggtgctatttatatttacaatggccgtgcagatgggatctcgtcaaccttctcacagagaattgaaggacttcagatcagcaaatcgttaagtatgtttggacagtctatatcaggacaaattgatgcagataataatggctatgtagatgtagcagttggtgcttttcggtctgattctgctgtcttgctaaggacaagacctgtagtaattgttgacgcttctttaagccaccctgagtcagtaaatagaacgaaatttgactgtgttgaaaatggatggccttctgtgtgcatagatctaacactttgtttctcatataagggcaaggaagttccaggttacattgttttgttttataacatgagtttggatgtgaacagaaaggcagagtctccaccaagattctatttctcttctaatggaacttctgacgtgattacaggaagcatacaggtgtccagcagagaagctaactgtagaacacatcaagcatttatgcggaaagatgtgcgggacatcctcaccccaattcagattgaagctgcttaccaccttggtcctcatgtcatcagtaaacgaagtacagaggaattcccaccacttcagccaattcttcagcagaagaaagaaaaagacataatgaaaaaaacaataaactttgcaaggttttgtgcccatgaaaattgttctgctgatttacaggtttctgcaaagattgggtttttgaagccccatgaaaataaaacatatcttgctgttgggagtatgaagacattgatgttgaatgtgtccttgtttaatgctggagatgatgcatatgaaacgactctacatgtcaaactacccgtgggtctttatttcattaagattttagagctggaagagaagcaaataaactgtgaagtcacagataactctggcgtggtacaacttgactgcagtattggctatatatatgtagatcatctctcaaggatagatattagctttctcctggatgtgagctcactcagcagagcggaagaggacctcagtatcacagtgcatgctacctgtgaaaatgaagaggaaatggacaatctaaagcacagcagagtgactgtagcaatacctttaaaatatgaggttaagctgactgttcatgggtttgtaaacccaacttcatttgtgtatggatcaaatgatgaaaatgagcctgaaacgtgcatggtggagaaaatgaacttaactttccatgttatcaacactggcaatagtatggctcccaatgttagtgtggaaataatggtaccaaattcttttagcccccaaactgataagctgttcaacattttggatgtccagactactactggagaatgccactttgaaaattatcaaagagtgtgtgcattagagcagcaaaagagtgcaatgcagaccttgaaaggcatagtccggttcttgtccaagactgataagaggctattgtactgcataaaagctgatccacattgtttaaatttcttgtgtaattttgggaaaatggaaagtggaaaagaagccagtgttcatatccaactggaaggccggccatccattttagaaatggatgagacttcagcactcaagtttgaaataagagcaacaggttttccagagccaaatccaagagtaattgaactaaacaaggatgagaatgttgcgcatgttctactggaaggactacatcatcaaagacccaaacgttatttcaccatagtgattatttcaagtagcttgctacttggacttattgtacttctattgatctcatatgttatgtggaaggctggcttctttaaaagacaatacaaatctatcctacaagaagaaaacagaagagacagttggagttatatcaacagtaaaagcaatgatgattaaggacttctttcaaattgagagaatggaaaacagactcaggttgtagtaaagaaatttaaaagacactgtttacaagaaaaaatgaattttgtttggacttcttttactcatgatcttgtgacatattatgtcttcatgcaaggggaaaatctcagcaatgattactctttgagatagaagaactgcaaaggtaataatacagccaaagataatctctcagcttttaaatgggtagagaaacactaaagcattcaatttattcaagaaaagtaagcccttgaagatatcttgaaatgaaagtataactgagttaaattatactggagaagtcttagacttgaaatactacttaccatatgtgcttgcctcagtaaaatgaaccccactgggtgggcagaggttcatttcaaatacatctttgatacttgttcaaaatatgttctttaaaaatataattttttagagagctgttcccaaattttctaacgagtggaccattatcactttaaagccctttatttataatacatttcctacgggctgtgttccaacaaccattttttttcagcagactatgaatattatagtattataggccaaactggcaaacttcagactgaacatgtacactggtttgagcttagtgaaattacttctgga

SEQ ID NO: 7581 - DNA, 3046 bp, Homo sapiens
agcggaccccagcctctgccaggttcggtccgccatcctcgtcccgtcctccgccggcccctgccccgcgcccagggatcctccagctcctttcgcccgcgccctccgttcgctccggacaccatggacaagttttggtggcacgcagcctggggactctgcctcgtgccgctgagcctggcgcagatcgatttgaatataacctgccgctttgcaggtgtattccacgtggagaaaaatggtcgctacagcatctctcggacggaggccgctgacctctgcaaggctttcaatagcaccttgcccacaatggcccagatggagaaagctctgagcatcggatttgagacctgcaggtatgggttcatagaagggcacgtggtgattccccggatccaccccaactccatctgtgcagcaaacaacacaggggtgtacatcctcacatccaacacctcccagtatgacacatattgcttcaatgcttcagctccacctgaagaagattgtacatcagtcacagacctgcccaatgcctttgatggaccaattaccataactattgttaaccgtgatggcacccgctatgtccagaaaggagaatacagaacgaatcctgaagacatctaccccagcaaccctactgatgatgacgtgagcagcggctcctccagtgaaaggagcagcacttcaggaggttacatcttttacaccttttctactgtacaccccatcccagacgaagacagtccctggatcaccgacagcacagacagaatccctgctaccactttgatgagcactagtgctacagcaactgagacagcaaccaagaggcaagaaacctgggattggttttcatggttgtttctaccatcagagtcaaagaatcatcttcacacaacaacacaaatggctggtacgtcttcaaataccatctcagcaggctgggagccaaatgaagaaaatgaagatgaaagagacagacacctcagtttttctggatcaggcattgatgatgatgaagattttatctccagcaccatttcaaccacaccacgggcttttgaccacacaaaacagaaccaggactggacccagtggaacccaagccattcaaatccggaagtgctacttcagacaaccacaaggatgactgatgtagacagaaatggcaccactgcttatgaaggaaactggaacccagaagcacaccctcccctcattcaccatgagcatcatgaggaagaagagaccccacattctacaagcacaatccaggcaactcctagtagtacaacggaagaaacagctacccagaaggaacagtggtttggcaacagatggcatgagggatatcgccaaacacccaaagaagactcccattcgacaacagggacagctgcagcctcagctcataccagccatccaatgcaaggaaggacaacaccaagcccagaggacagttcctggactgatttcttcaacccaatctcacaccccatgggacgaggtcatcaagcaggaagaaggatggatatggactccagtcatagtataacgcttcagcctactgcaaatccaaacacaggtttggtggaagatttggacaggacaggacctctttcaatgacaacgcagcagagtaattctcagagcttctctacatcacatgaaggcttggaagaagataaagaccatccaacaacttctactctgacatcaagcaataggaatgatgtcacaggtggaagaagagacccaaatcattctgaaggctcaactactttactggaaggttatacctctcattacccacacacgaaggaaagcaggaccttcatcccagtgacctcagctaagactgggtcctttggagttactgcagttactgttggagattccaactctaatgtcaatcgttccttatcaggagaccaagacacattccaccccagtggggggtcccataccactcatggatctgaatcagatggacactcacatgggagtcaagaaggtggagcaaacacaacctctggtcctataaggacaccccaaattccagaatggctgatcatcttggcatccctcttggccttggctttgattcttgcagtttgcattgcagtcaacagtcgaagaaggtgtgggcagaagaaaaagctagtgatcaacagtggcaatggagctgtggaggacagaaagccaagtggactcaacggagaggccagcaagtctcaggaaatggtgcatttggtgaacaaggagtcgtcagaaactccagaccagtttatgacagctgatgagacaaggaacctgcagaatgtggacatgaagattggggtgtaacacctacaccattatcttggaaagaaacaaccgttggaaacataaccattacagggagctgggacacttaacagatgcaatgtgctactgattgtttcattgcgaatcttttttagcataaaattttctactctttttgttttttgtgttttgttctttaaagtcaggtccaatttgtaaaaacagcattgctttctgaaattagggcccaattaataatcagcaagaatttgatcgttccagttcccacttggaggcctttcatccctcgggtgtgctatggatggcttctaacaaaaactacacatatgtattcctgatcgccaacctttcccccaccagctaaggacatttcccagggttaatagggcctggtccctgggaggaaatttgaatgggtccattttgcccttccatagcctaatccctgggcattgctttccactgaggttgggggttggggtgtactagttacacatcttcaacagaccccctctagaaatttttcagatgcttctgggagacacccaaagggtgaagctatttatctgtagtaaactatttatctgtgtttttgaaatattaaaccctggatcagtcctttgatcagtataattttttaaagttactttgtcagaggcacaaaagggtttaaactgattcataataaatatctgtacttcttcgatcttca

SEQ ID NO: 7582 - DNA, 938 bp, Homo sapiens
ggcatcctgtgagcagcaaacacatctgagcctggaaaagacgcagagaagtaaaagatcaaagtctgattggcaccggctcccattccggctccagcctccaatccgacccccatttcggctgcagcctcggacctagctccggccctcggtctatccggttgcatcctccctccctgttccggatcttatcttgcgccagcgcctactccaggatcccgtagccagacctcaagccatggctggtcccttctcccgtctgctgtccgcccgcccgggactcaggctcctggctttggccggagcggggtctctagccgctgggtttctgctccgaccggaacctgtacgagctgccagtgaacgacggaggctgtatcccccgaggcttttcccctcctccatccgtagtgttgtgtcatgggaggaaagaactgagcagatctgaagaaactgagctggccagccagaggcaactagaactattaggaaagcatagactctgaaagtccctaaagagattaccaaggtttaccctctttctaattccccctcctcccgcggagcaaagccagacatggccaactggacagctcccaggtaactgcactaggtctaggcgtctgtgccctccctccatggttactgggtaccccctccccagcgctgagtacccagacctccgaaagcacaacaactgcatggccagtcacctgaccccagcagtctatgcacggctctgcgacaagaccacacccactggttggacgctagatcagtgtatccagactggcgtggacaaccctggccaccccttcatcaagactgtgggcatggtggctggagatgaggagacctatgaggtatttgctgacctgtttgaccctgtgatccaagagcgacacaatggatatgacccccggacaatgaagcacacc

SEQ ID NO: 7583 - DNA, 1005 bp, Homo sapiens
agagatcccagcgcgcagaacttggggagccgccgccgccatccgccgccgcagccagcttccgccgccgcaggaccggcccctgccccagcctccgcagccgcggcgcgtccacgcccgcccgcgcccagggcgagtcggggtcgccgcctgcacgcttctcagtgttccccgcgccccgcatgtaacccggccaggcccccgcaactgtgtcccctgcagctccagccccgggctgcacccccccgccccgacaccagctctccagcctgctcgtccaggatggccgcggccaaggccgagatgcagctgatgtccccgctgcagatctctgacccgttcggatcctttcctcactcgcccaccatggacaactaccctaagctggaggagatgatgctgctgagcaacggggctccccagttcctcggcgccgccggggccccagagggcagcggcagcaacagcagcagcagcagcagcgggggcggtggaggcggcgggggcggcagcaacagcagcagcagcagcagcaccttcaaccctcaggcggacacgggcgagcagccctacgagcacctgaccgcagagtcttttcctgacatctctctgaacaacgagaaggtgctggtggagaccagttaccccagccaaaccactcgactgccccccatcacctatactggccgcttttccctggagcctgcacccaacagtggcttcccctccccgtcggtggccaccacgtactcctctgttccccctgctttcccggcccaggtcagcagcttcccttcctcagctgtcaccaactccttcagcgcctccacagggctttcggacatgacagcaaccttttctcccaggacaattgaaatttgctaaagggaaaggggaaagaaagggaaaagggagaaaaagaaacacaagagacttaaaggacaggaggaggagatggccataggagaggagggttcctcttaggtcagatggaggttctcagag

SEQ ID NO: 7584 - DNA, 4181 bp, Homo sapiens
gactctgcttctagaagcccagtcttcaaaatgagcttacctttcagtgatttggataaggcatagttttgtttttaagacccctttttctgattaaagtgcccaacatgagtggaagaggagatggagggcagcagcagctgctgcactcaaagtttttggctgggtttgtctgccacattgaaaagaatgaaagtcagcgtgggagaaattgtaacgagaaaccaacaaatgtcaggaaaagaaaattcattaacagagatctggctcatgattcagaagaactctttcaagatctaagtcaattacaggaaacatggcttgcagaagctcaggtacctgacaatgatgagcagtttgtaccagactatcaggctgaaagtttggcttttcatggcctgccactgaaaatcaagaaagaaccccacagtccatgttcagaaatcagctctgcctgcagtcaagaacagccctttaaattcagctatggagaaaagtgcctgtacaatgtcagtgcctatgatcagaagccacaagtgggaatgaggccctccaacccccccacaccatccagcacgccagtgtccccactgcatcatgcatctccaaactcaactcatacaccgaaacctgaccgggccttcccagctcacctccctccatcgcagtccataccagatagcagctaccccatggaccacagatttcgccgccagctttctgaaccctgtaactcctttcctcctttgccgacgatgccaagggaaggacgtcctatgtaccaacgccagatgtctgagccaaacatccccttcccaccacaaggctttaagcaggagtaccacgacccagtgtatgaacacaacaccatggttggcagtgcggccagccaaagctttccccctcctctgatgattaaacaggaacccagagattttgcatatgactcagaagtgcctagctgccactccatttatatgaggcaagaaggcttcctggctcatcccagcagaacagaaggctgtatgtttgaaaagggccccaggcagttttatgatgacacctgtgttgtcccagaaaaattcgatggagacatcaaacaagagccaggaatgtatcgggaaggacccacataccaacggcgaggatcacttcagctctggcagtttttggtagctcttctggatgacccttcaaattctcattttattgcctggactggtcgaggcatggaatttaaactgattgagcctgaagaggtggcccgacgttggggcattcagaaaaacaggccagctatgaactatgataaacttagccgttcactccgctattactatgagaaaggaattatgcaaaaggtggctggagagagatatgtctacaagtttgtgtgtgatccagaagcccttttctccatggcctttccagataatcagcgtccactgctgaagacagacatggaacgtcacatcaacgaggaggacacagtgcctctttctcactttgatgagagcatggcctacatgccggaagggggctgctgcaacccccacccctacaacgaaggctacgtgtattaacacaagtgacagtcaagcagggcgtttttgcgcttttccttttttctgcaagatacagagaattgctgaatctttgttttatttctgttgtttgtattttatttttaaataataatacacaaaaaggggcttttcctgttgcattattctatggtctgccatggactgtgcactttatttgagggtgggtgggagtaatctaaacatttattctgtgtaacaggaagctaatgggtgaatgggcagagggatttggggattactttttacttaggcttgggatggggtcctacaagttttgagtatgatgaaactatatcatgtctgtttgatttcataacaacataagataatgtttattttatcggggtatctatggtacagttaatttcacgttgtgtaaatatccacttggagactatttgccttgggcattttcccctgtcatttatgagtctctgcaggtgtacaaaaaaaccccaatctactgtaaatggcagtttaattgttagaaatgactgtttttgcaccacttgtaaaaaggtatttagcgattgcatttgctgtttgttgttttattttgctttatatatgacttgcagaggataaccataaaatgggtaattctctctgaagttgaataatcaccatgactgtaaatgaggggcacaattttggactctggcgccaaactgagtcataggccagtagcattacgtgtatctggtgccaccttgctgtttagatacaaatcataccgtcttttaaatattttgaagcccatttcagttaaataatgacatgtcatggtcctttggaatcttcatttaaatgttaaatctggaatcaaaatgaagcaaaaaatatctgtctccttttcactttcttcagtacataaatacattatttaatcaataagaattaactgtactaaatcatgtattatgctgttctagttacagcaaacactctttaagaaaaatatccaatacactaaataggtactatagtaatttttagacatggtacccattgatatgcatttaaaccttttactgctgtgttatgttgataacatatataaatattagataatgctaatgcttctgctgctgtcttttctgtaatattctctttcatgctgaatttactatgaccatttataagcagtgcagttaactacagatagcatttcaggacaaaatagatgactcaaaccatttattgcttaaaaaatagcttacgccatgctatgctataagcagcttttatgcacattgacaaatgaagagtaagcttcagcttgctaaaggaaactgtggaaccttttgtaacttttggtgatatggaaaattatttacaaaccgtcaaagaatatgaggaagttgctgtatgacatagtgctggcactgatattatccatcatctctttttggacacttctgtaaatgtgattggattgtttgaaagaagatttaaagtttcaaagttttttgttctgtttttgctttgcatttggagaaaatattgaaagcagggtatgttgtttcattcaccttgaaaaaaccatgagtaaatggggatatagaatctctgaatagctcgctaaaagattcaagcaagggacatgaattttgttccatctatcaataatatccagaagaacaacttttttaaagagtctatagcaaaaagcaaaaaaaaaaaaaaattctaaacacaaagtcaaaataaacctattgtaaaagcatttcgtgatgagcatgaaaaagattgtttaaagatgatccccccagctacccattttccaaaactacacagatcacagctcatttctctaagtggagcagttatcaagaaacccaaacaccaaaattgctactcttcacatttaatcctacaaaaagtactccaatttcaaaatatgtatgtaacctgcgatttcaatgattgttgttcatatacatcatgtattattttggcccattttgggcctaaaaaagaaaactatgccttaaaaatcagaaccttttctccccactatgcttatgtggccatctacagcacttagaataaaaacagatgttaaaatattcagtgaaagttttattggaaaaaggaattgagatatataattgagatttggtgaaattgaaggagaaaatttaagtgagtctttaaaatatattctgaatgaaaactgtattgaggattcatttttgttccttttttttctttttctcttttctcctttttcttctttttaatagtctagttttagtcagtcagtgaggaagaattgggccatgctaacgttatcacaagagaacaatggcagaaatggtattagttatataatatttaaggacaaactatatgttttgctgttttaacgtagtgactcactgaactaaatacataattgaccaacattaagtgtatttccaatacagaagggttgaaaatattacattataaactcttttgaaaaatgtatctaaaattttttaagttctgttttgattccactttttggttgagtttttatgtttttgttttcaggtagattaataaatctggcagctgatttctgcaaga

SEQ ID NO: 7585 - DNA, 1848 bp, Homo sapiens
acagaaggagaacttgaagcagaatggctgcaagatgtgggtttatcaactctgatctcaggtgatgaagaggaagatggcaaagccttgctctccacattgactcgaacccaagcagctgccgtgcaaaagagataccatacctatacccaaaccatgaggaaaaaggataagcaatctatcagggatgtcagagacatttttggagtcagtgaatctcctcctcgtgatacctgtggcaaccacactaatcagctggatggcaccaaggaagaaagagagcttccaagagttatcaagacaagtggttccatgccagatgatgcttctctcaacagtactaccctgtctgacgcatcccaggataaagaagggagttttgcggttcccaggagtgactctgtggctatacttgagaccattccagttctaccagttcattccaatggatcaccggagcctggacagccagttcagaatgcgataagtgatgatgattttctggaaaagaacattccaccagaggctgaagagctgtcatttgaagtgtcttattcagaaatggttacggaggctctaaaaagaaataaacttaagaaatcagagattaagaaagaagactatgttttaactaaatttaatgttcagaaaaccagatttggcttaactgaagcaggagatctgtctgctgaagacatgaagaaaatccgccatctctctctgattgaattgactgccttttttgatgcctttggaattcaactgaaaaggaacaaaacagagaaagtaaaaggacgagacaatgggatttttggagttccacttacagtcctcctggacggtgaccgaaagaaagaccctggagtgaaagttcccctggtattacaaaaattttttgagaaagttgaggaatcaggtctggaatctgaaggaatttttcgactttcaggatgtactgctaaagtcaagcaataccgtgaagaacttgatgccaagtttaatgctgataaatttaaatgggacaaaatgtgccatagagaagctgcagtaatgttgaaagcgtttttcagagaactacccacctctctcttccctgtggaatatatacctgccttcatcagtctaatggaaagagggcctcacgtcaaagtacagtttcaagccttacacctcatggtcatggcgctgcctgatgccaacagagatgcagctcaggccctcatgacattcttcaataaagtgattgccaatgaatcaaaaaaccgaatgagtctgtggaacatttctacagtgatggcaccaaaccttttcttcagtagaagcaaacactctgattatgaagaattactgttagcaaacactgcggcccacatcatccgcctaatgcttaagtaccagaagattttgtggaaggttccatctttcttaatcactcaagtaagaagaatgaatgaagccacgatgctattgaagaagcagctcccaagtgtcaggaagctgctcaggaggaagaccctcgagcgggagactgcaagccccaagacttcaaaggtactgcaaaaatcaccctcggcaagacgaatgtctgacgtgccggaaggagtcatacgggtccatgctccacttctctccaaggtgtccatggccattcaactcaacaatcaaaccaaagccaaagacatattggcaaaatttcaatatgaaaacagaatactgcactggcagcgagctgcactttccttcctaaatggaaaatgggttaaaaaagaaagagaagagtcgacagagaccaacaggagccccaaacatgtattcctcttcactattggcctggacatctccacatag

SEQ ID NO: 7586 - DNA, 3090 bp, Homo sapiens
aacagagctgcctcctggctctttgggagcctgggaggagaaggagccgggaggggcgctgcggggaagccacctgcggattcactggctgctgctccgcccaggactgctagcaagcacggagggctgccagacctggggctccctgctccgtgcgtcaggttggggaaaccaccgtctgccccagaccctgacccaggacccgcctggaggaagctgggaccgaggctgggccaagatggtgtctgtgtttcgaagcgaggagatgtgtttgtcacaactgtttctccaggtggaagctgcatattgctgtgtggctgagctcggagagctcggattggttcagttcaaagatttaaatatgaatgtgaacagctttcaaaggaaatttgtgaatgaagtcagaaggtgtgaatcactggagagaatcctccgttttctggaagacgagatgcaaaatgagattgtagttcagttgctcgagaaaagcccactgaccccgctcccacgggaaatgattaccctggagactgttctagaaaaactggaaggagagttacaggaagccaaccagaaccagcaggccttgaaacaaagcttcctagaactgacagaactgaaatacctcctgaagaaaacccaagacttctttgagacggaaaccaatttagctgatgatttctttactgaggacacttctggcctcctggagttgaaagcagtgcctgcatatatgaccggaaagttggggttcatagccggtgtgatcaacagggagaggatggcttcctttgagcggttactgtggcgaatctgccgaggaaacgtgtacttgaagttcagtgagatggacgcccctctggaggatcctgtgacgaaagaagaaattcagaagaacatattcatcatattttaccaaggagagcagctcaggcagaaaatcaagaagatctgtgatgggtttcgagccactgtctacccttgcccagagcctgcggtggagcgcagagagatgttggagagcgtcaatgtgaggctggaagatttaatcaccgtcataacacaaacagagtctcaccgccagcgcctgctgcaggaagccgctgccaactggcactcctggctcatcaaggtgcagaagatgaaagctgtctaccacatcctgaacatgtgcaacatcgacgtcacccagcagtgtgtcatcgccgagatctggttcccggtggcagatgccacacgtatcaagagggcactggagcaaggcatggaactaagtggctcctccatggcccccatcatgaccacagtgcaatctaaaacagcccctcccacatttaacaggaccaataaattcacagctggcttccagaatattgttgatgcctatggtgtcggcagctaccgggagataaacccagccccctacaccatcatcactttccccttcctgttcgctgtgatgtttggagactgtggtcatggaaccgtgatgctcctggctgcactttggatgattctgaatgagagacgcttgctctcccagaagacagacaatgagatttggaacaccttcttccacgggcgctatctgatcctacttatgggcatcttctccatctacacgggtttgatctacaatgactgcttctccaagtccttgaacatctttggctcttcttggagtgtccaacccatgttcagaaacggcacatggaatactcatgtaatggaggaaagtctatatctgcagctggacccagccataccaggagtgtattttggaaatccatacccgtttgggattgatccgatttggaacttggcttcaaacaaactcacatttctgaactcgtataaaatgaagatgtcggtgatcctgggaattgtccagatggttttcggtgtcatcctcagccttttcaatcacatatacttcagaagaactctcaacatcattctgcaatttatccctgagatgatttttatcctgtgtctgtttggatacctggttttcatgatcattttcaaatggtgctgctttgacgtccatgtatctcagcacgcccccagcatcctcatccacttcatcaacatgtttctgtttaactacagtgactcttccaacgcacccctctacaaacatcagcaagaagtccaaagtttctttgtggttatggctttgatttctgtgccgtggatgcttctgattaagccgtttattcttagagccagtcatcggaaatcccagctgcaggcatccaggatccaagaagatgccactgagaacattgaaggtgatagctccagcccttctagccgttctggccagaggacttctgcagatacccacggggctctggacgaccatggagaagagttcaactttggagacgtctttgtccaccaagccatccacaccatcgagtactgcctgggctgcatttcaaacacagcctcctacctgcggctctgggccctcagcctggctcatgcacaactgtctgaagtgctctggactatggtgatgaacagcggccttcagacgcgaggctggggaggaatcgtcggggtttttattatttttgccgtatttgctgtcctgacagtagccatccttctgatcatggagggcctctctgctttcctgcacgccctgcgactgcactgggttgagttccagaacaagttctatgtcggggatggttacaagttttctccattctcctttaaacacatcctggatggcacagccgaggagtaggctgagggctgcacctcccacggtggtcaccatgccaatgaaggaagttcagtcttgtctttgatatcagcccctgcaaggcgctcaatgggaaggttgttcttggctcacctgaagcatgaaactgtgtattatttggacgtcagcctgtggatttgatacgacttaaccacgtcagaggaaggactttggcaagtgatattgtcttcatgtggggtattaattctcaaataataaagtaattgacaaatgaggggagaatgctaaacagatgtcttcttgcaatattttaaatattgtatttgagaaaataaacatctgagtcattc

SEQ ID NO: 7587 - DNA, 874 bp, Homo sapiens
caaggcaagtggattgcctgacctcaggaatttgagaccagcctgggcaacatggtacaatgcccatctttgctaaaattcaaaaatgtagctgggcgtggtggtgcacacctgtagttccagctactcgggaggctgaggcacgagaactgcttgaagcccagaggtgaaggttgccgtgagccgccatgaagccactgcactccagcctggacgaccgagtgagaaaccaccttcaaaagaagaaaaaagacattactaagggctgggtgcagtggctcagacctgtaatctcaacacttttggaggctgaggcaggaggatttcttgagtctaggacttggagaccagcctgagcaacaaactgcaaagcatacgtgctatttccacactcttcttttgcagcagggcaggagccacacactcaaccactttgggttttttttttttttttcaccaaatggcatttcatgttaattcttctggccacagctctgacgtctgaccccaccccagctcaggggcccaagagatgctttagctcatgttccatctgtcttcctgaagaccaggtctcctcctctgtgatggggtgggaggtccgtgacggcaaggcaatgaggggcacgtgcaggcattttaaggaatcgctcttcatccacagctggtcactaaccatgatgagaccactgtccctttccacgacaccagcttcttgctaggaacatctgcctggggtcttttctctccccgaaagcctcttgcagacattctttggaaagtactcctgagctctgtgtgtttgttgaaggctgctcttgtcacacagttgcttgagggcaggtttctcagccttagcactgctgacatttca

SEQ ID NO: 7588 - DNA, 2609 bp, Homo sapiens
attttcttagcgtttctggagattacaacatcctgcggttccgtttctgggaactttactgatttatctcccccctcacacaaataagcattgattcctgcatttctgaagatctcaagatctggactactgttgaaaaaatttccagtgaggctcacttatgtctgtaaagatgggaaaaaaatacaagaacattgttctactaaaaggattagaggtcatcaatgattatcattttagaatggttaagtccttactgagcaacgatttaaaacttaatttaaaaatgagagaagagtatgacaaaattcagattgctgacttgatggaagaaaagttccgaggtgatgctggtttgggcaaactaataaaaattttcgaagatataccaacgcttgaagacctggctgaaactcttaaaaaagaaaagttaaaagtaaaaggaccagccctatcaagaaagaggaagaaggaagtggatgctacttcacctgcaccctccacaagcagcactgtcaaaactgaaggagcagaggcaactcctggagctcagaacccgaaaacagtggccaaatgtcaggtaactcccagaagaaatgttctccaaaaacgcccagtgatagtgaaggtactgagtacaacaaagccatttgaatatgagaccccagaaatggagaaaaaaataatgtttcatgctacagtggctacacagacacagttcttccatgtgaaggttttaaacaccagcttgaaggagaaattcaatggaaagaaaatcatcatcatatcagattatttggaatatgatagtctcctagaggtcaatgaagaatctactgtatctgaagctggtcctaaccaaacgtttgaggttccaaataaaatcatcaacagagcaaaggaaactctgaagattgatattcttcacaaacaagcttcaggaaatattgtatatggggtatttatgctacataagaaaacagtaaatcagaagaccacaatctacgaaattcaggatgatagaggaaaaatggatgtagtggggacaggacaatgtcacaatatcccctgtgaagaaggagataagctccaacttttctgctttcgacttagaaaaaagaaccagatgtcaaaactgatttcagaaatgcatagttttatccagataaagaaaaaaacaaacccgagaaacaatgaccccaagagcatgaagctaccccaggaacagcgtcagcttccatatccttcagaggccagcacaaccttccctgagagccatcttcggactcctcagatgccaccaacaactccatccagcagtttcttcaccaagaaaagtgaagacacaatctccaaaatgaatgacttcatgaggatgcagatactgaaggaagggagtcattttccaggaccgttcatgaccagcataggcccagctgagagccatccccacactcctcagatgcctccatcaacaccaagcagcagtttcttaaccacgaaaagtgaagacacaatctccaaaatgaatgacttcatgaggatgcagatactgaaggaagggagtcattttccaggaccgttcatgaccagcataggcccagctgagagccatccccacactcctcagatgcctccatcaacaccaagcagcagtttcttaaccacgttgaaaccaagactgaagactgaacctgaagaagtttccatagaagacagtgcccagagtgacctcaaagaagtgatggtgctgaacgcaacagaatcatttgtatatgagcccaaagagcagaagaaaatgtttcatgccacagtggcaactgagaatgaagtcttccgagtgaaggtttttaatattgacctaaaggagaagttcaccccaaagaagatcattgccatagcaaattatgtttgccgcaatgggttcctggaggtatatcctttcacacttgtggctgatgtgaatgctgaccgaaacatggagatcccaaaaggattgattagaagtgccagcgtaactcctaaaatcaatcagctttgctcacaaactaaaggaagttttgtgaatggggtgtttgaggtacataagaaaaatgtaaggggtgaattcacttattatgaaatacaagataatacagggaagatggaagtggtggtgcatggacgactgaccacaatcaactgtgaggaaggagataaactgaaactcacctgctttgaattggcaccgaaaagtgggaataccggggagttgagatctgtaattcatagtcacatcaaggtcatcaagaccaggaaaaacaagaaagacatactcaatcctgattcaagtatggaaacttcaccagactttttcttctaaaatctggatgtcattgacgataatgtttatggagataaggtctaagtgcctaaaaaaatgtacatatacctggttgaaatacaacactatacatacacaccaccatatatactagctgttaatcctatggaatggggtattgggagtgcttttttaatttttcatagtttttttttaataaaatggcatattttgcatctacaacttctataatttgaaaaaataaataaacattatcttttttgtg

SEQ ID NO: 7589 - DNA, 8487 bp, Homo sapiens
gagtagctccagcggccacgctgaggcgagggtgacacaccatgctcacggcccctggagaccgtcgtgctggcgagccgtgctccgtagctccccggtccgcctcggcagcggtcagagtcgcctacaggagttgagccgcccgcgccagaaggttttggcgaagctcttggagaggcgtcgagcacagtagggcggcgggggtgcgttgagcgctcgggggtcaggcagtcggccgggatcgccgctggggagcgtttccgaggcgaggaggaggaggaggagatgctgctcctcttctccccctccccaggctccttctacagctccttcagcccacgcccgcagccgcttgtgggagaagtggtggtggctctcggcgcccgcggcggctgccggcggcccgccccgacgccgcgtccctgcagccctcgcccggcgctccagtagcaggacccggtctcgggaccagccggtaatatgcacgtgtcactagctgaggccctggaggttcggggtggaccacttcaggaggaagaaatatgggctgtattaaatcaaagtgctgaaagtctccaagaattattcagaaaagtaagcctagctgatcctgctgcccttggcttcatcatttctccatggtctctgctgttgctgccatctggtagtgtgtcatttacagatgaaaatatttccaatcaggatcttcgagcattcactgcaccagaggttcttcaaaatcagtcactaacttctctctcagatgttgaaaagatccacatttattctcttggaatgacactgtattggggggctgattatgaagtgcctcagagccaacctattaagcttggagatcatctcaacagcatactgcttggaatgtgtgaggatgttatttacgctcgagtttctgttcggactgtgctggatgcttgcagtgcccacattaggaatagcaattgtgcaccctcattttcctacgtgaaacacttggtaaaactggttctgggaaatctttctgggacagatcagctttcctgtaacagtgaacaaaagcctgatcgaagccaggctattcgagatcgattgcgaggaaaaggattaccaacaggaagaagctctacttctgatgtactagacatacaaaagcctccactctctcatcagacctttcttaacaaagggcttagtaaatctatgggatttctgtccatcaaagatacacaagatgagaattatttcaaggacattttatcagataattctggacgtgaagattctgaaaatacattctccccttaccagttcaaaactagtggcccagaaaaaaaacccatccctggcattgatgtgctttctaagaagaagatctgggcttcatccatggacttgctttgtacagctgacagagacttctcttcaggagagactgccacatatcgtcgttgtcaccctgaggcagtaacagtgcggacttcaactactcctagaaaaaaggaggcaagatactcagatggaagtatagccttggatatctttggccctcagaaaatggatccaatatatcacactcgagaattgcccacctcctcagcaatatcaagtgctttggaccgaatccgagagagacaaaagaaacttcaggttctgagggaagccatgaatgtagaagaaccagttcgaagatacaaaacttatcatggtgatgtctttagtacctccagtgaaagtccatctattatttcctctgaatcagatttcagacaagtgagaagaagtgaagcctcaaagaggtttgaatccagcagtggtctcccaggggtagatgaaaccttaagtcaaggccagtcacagagaccgagcagacaatatgaaacaccctttgaaggcaacttaattaatcaagagatcatgctaaaacggcaagaggaagaactgatgcagctacaagccaaaatggcccttagacagtctcggttgagcctatatccaggagacacaatcaaagcgtccatgcttgacatcaccagggatccgttaagagaaattgccctagaaacagccatgactcaaagaaaactgaggaatttctttggccctgagtttgtgaaaatgacaattgaaccatttatatctttggatttgccacggtctattcttactaagaaagggaagaatgaggataaccgaaggaaagtaaacataatgcttctgaacgggcaaagactggaactgacctgtgataccaaaactatatgtaaagatgtgtttgatatggttgtggcacatattggcttagtagagcatcatttgtttgctttagctaccctcaaagataatgaatatttctttgttgatcctgacttaaaattaaccaaagtggccccagagggatggaaagaagaaccaaagaaaaagaccaaagccactgttaattttactttgtttttcagaattaaattttttatggatgatgttagtctaatacaacatactctgacgtgtcatcagtattaccttcagcttcgaaaagatattttggaggaaaggatgcactgtgatgatgagacttccttattgctggcatccttggctctccaggctgagtatggagattatcaaccagaggttcatggtgtgtcttactttagaatggagcactatttgcccgccagagtgatggagaaacttgatttatcctatatcaaagaagagttacccaaattgcataatacctatgtgggagcttctgaaaaagagacagagttagaatttttaaaggtctgccaaagactgacagaatatggagttcattttcaccgagtgcaccctgagaagaagtcacaaacaggaatattgcttggagtctgttctaaaggtgtccttgtgtttgaagttcacaatggagtgcgcacattggtccttcgctttccatggagggaaaccaagaaaatatctttttctaaaaagaaaatcacattgcaaaatacatcagatggaataaaacatggcttccagacagacaacagtaagatatgccagtacctgctgcacctctgctcttaccagcataagttccagctacagatgagagcaagacagagcaaccaagatgcccaagatattgagagagcttcgtttaggagcctgaatctccaagcagagtctgttagaggatttaatatgggacgagcaatcagcactggcagtctggccagcagcaccctcaacaaacttgctgttcgacctttatcagttcaagctgagattctgaagaggctatcctgctcagagctgtcgctttaccagccattgcaaaacagttcaaaagagaagaatgacaaagcttcatgggaggaaaagcctagagagatgagtaaatcataccatgatctcagtcaggcctctctctatccacatcggaaaaatgtcattgttaacatggaacccccaccacaaaccgttgcagagttggtgggaaaaccttctcaccagatgtcaagatctgatgcagaatctttggcaggagtgacaaaacttaataattcaaagtctgttgcgagtttaaatagaagtcctgaaaggaggaaacatgaatcagactcctcatccattgaagaccctgggcaagcatatgttctagatgtgctacacaaaagatggagcatagtatcttcaccagaaagggagatcaccttagtgaacctgaaaaaagatgcaaagtatggcttgggatttcaaattattggtggggagaagatgggaagactggacctaggcatatttatcagttcagttgcccctggaggaccagctgacttggatggatgcttgaagccaggagaccgtttgatatctgtgaatagtgtgagtctggagggagtcagccaccatgctgcaattgaaattttgcaaaatgcacctgaagatgtgacacttgttatctctcagccaaaagaaaagatatccaaagtgccttctactcctgtgcatctcaccaatgagatgaaaaactacatgaagaaatcttcctacatgcaagacagtgctatagattcttcttccaaggatcaccactggtcacgtggtaccctgaggcacatctcggagaactcctttgggccatctgggggcctgcgggaaggaagcctgagttctcaagattccaggactgagagtgccagcttgtctcaaagccaggtcaatggtttctttgccagccatttaggtgaccaaacctggcaggaatcacagcatggcagcccttccccatctgtaatatccaaagccaccgagaaagagactttcactgatagtaaccaaagcaaaactaaaaagccaggcatttctgatgtaactgattactcagaccgtggagattcagacatggatgaagccacttactccagcagtcaggatcatcaaacaccaaaacaggaatcttcctcttcagtgaatacatccaacaagatgaattttaaaactttttcttcatcacctcctaagcctggagatatctttgaggttgaactggctaaaaatgataacagcttggggataagtgtcacgggaggtgtgaatacgagtgtcagacatggtggcatttatgtgaaagctgttattccccagggagcagcagagtctgatggtagaattcacaaaggtgatcgcgtcctagctgtcaatggagttagtctagaaggagccacccataagcaagctgtggaaacactgagaaatacaggacaggtggttcatctgttattagaaaagggacaatctccaacatctaaagaacatgtcccggtaaccccacagtgtaccctttcagatcagaatgcccaaggtcaaggcccagaaaaagtgaagaaaacaactcaggtcaaagactacagctttgtcactgaagaaaatacatttgaggtaaaattatttaaaaatagctcaggtctaggattcagtttttctcgagaagataatcttataccggagcaaattaatgccagcatagtaagggttaaaaagctctttcctggacagccagcagcagaaagtggaaaaattgatgtaggagatgttatcttgaaagtgaatggagcctctttgaaaggactatctcagcaggaagtcatatctgctctcaggggaactgctccagaagtattcttgcttctctgcagacctccacctggtgtgctaccggaaattgatactgcgcttttgaccccacttcagtctccagcacaagtacttccaaacagcagtaaagactcttctcagccatcatgtgtggagcaaagcaccagctcagatgaaaatgaaatgtcagacaaaagcaaaaaacagtgcaagtccccatccagaagagacagttacagtgacagcagtgggagtggagaagatgacttagtgacagctccagcaaacatatcaaattcgacctggagttcagctttgcatcagactctaagcaacatggtatcacaggcacagagtcatcatgaagcacccaagagtcaagaagataccatttgtaccatgttttactatcctcagaaaattcccaataaaccagagtttgaggacagtaatccttcccctctaccaccggatatggctcctgggcagagttatcaaccccaatcagaatctgcttcctctagttcgatggataagtatcatatacatcacatttctgaaccaactagacaagaaaactggacacctttgaaaaatgacttggaaaatcaccttgaagactttgaactggaagtagaactcctcattaccctaattaaatcagaaaaaggaagcctgggttttacagtaaccaaaggcaatcagagaattggttgttatgttcatgatgtcatacaggatccagccaaaagtgatggaaggctaaaacctggggaccggctcataaaggttaatgatacagatgttactaatatgactcatacagatgcagttaatctgctccgggctgcatccaaaacagtcagattagttattggacgagttctagaattacccagaataccaatgttgcctcatttgctaccggacataacactaacgtgcaacaaagaggagttgggtttttccttatgtggaggtcatgacagcctttatcaagtggtatatattagtgatattaatccaaggtccgtcgcagccattgagggtaatctccagctattagatgtcatccattatgtgaacggagtcagcacacaaggaatgaccttggaggaagttaacagagcattagacatgtcacttccttcattggtattgaaagcaacaagaaatgatcttccagtggtccccagctcaaagaggtctgctgtttcagctccaaagtcaaccaaaggcaatggttcctacagtgtggggtcttgcagccagcctgccctcactcctaatgattcattctccacggttgctggggaagaaataaatgaaatatcgtaccccaaaggaaaatgttctacttatcagataaagggatcaccaaacttgactctgcccaaagaatcttatatacaagaagatgacatttatgatgattcccaagaagctgaagttatccagtctctgctggatgttgtggatgaggaagcccagaatcttttaaacgaaaataatgcagcaggatactcctgtggtccaggtacattaaagatgaatgggaagttatcagaagagagaacagaagatacagactgcgatggttcacctttacctgagtattttactgaggccaccaaaatgaatggctgtgaagaatattgtgaagaaaaagtaaaaagtgaaagcttaattcagaagccacaagaaaagaagactgatgatgatgaaataacatggggaaatgatgagttgccaatagagagaacaaaccatgaagattctgataaagatcattcctttctgacaaacgatgagctcgctgtactccctgtcgtcaaagtgcttccctctggtaaatacacgggtgccaacttaaaatcagtcattcgagtcctgcggggtttgctagatcaaggaattccttctaaggagctggagaatcttcaagaattaaaacctttggatcagtgtctaattgggcaaactaaggaaaacagaaggaagaacagatataaaaatatacttccctatgatgctacaagagtgcctcttggagatgaaggtggctatatcaatgccagcttcattaagataccagttgggaaagaagagttcgtttacattgcctgccaaggaccactgcctacaactgttggagacttctggcagatgatttgggagcaaaaatccacagtgatagccatgatgactcaagaagtagaaggagaaaaaatcaaatgccagcgctattggcccaacatcctaggcaaaacaacaatggtcagcaacagacttcgactggctcttgtgagaatgcagcagctgaagggctttgtggtgagggcaatgacccttgaagatattcagaccagagaggtgcgccatatttctcatctgaatttcactgcctggccagaccatgatacaccttctcaaccagatgatctgcttacttttatctcctacatgagacacatccacagatcaggcccaatcattacgcactgcagtgctggcattggacgttcagggaccctgatttgcatagatgtggttctgggattaatcagtcaggatcttgattttgacatctctgatttggtgcgctgcatgagactacaaagacacggaatggttcagacagaggatcaatatattttctgctatcaagtcatcctttatgtcctgacacgtcttcaagcagaagaagagcaaaaacagcagcctcagcttctgaagtgacatgaaaagagcctctggatgcatttccatttctctccttaacctccagcagactcctgctctctatccaaaataaagatcacagagcagcaagttcatacaacatgcatgttctcctctatcttagaggggtattcttcttgaaaataaaaaatattgaaatgctgtatttttacagctactttaacctatgataattatttacaaaattttaacactaaccaaacaatgcagatcttagggatgattaaaggcagcatttgatgatagcagacattgttacaaggacatggtgagtctatttttaatgcaccaatcttgtttatagcaaaaatgttttccaatattttaataaagtagttattttataggggatacttgaaaccagtatttaagctttaaatgacagtaatattggcatagaaaaaagtagcaaatgtttactgtatcaatttctaatgtttactatatagaatttcctgtaatatatttatatactttttcatgaaaatggagttatcagttatctgtttgttactgcatcatctgtttgtaatcattatctcactttgtaaataaaaacacaccttaaaacatgaacaagcc

SEQ ID NO: 7590 - DNA, 723 bp, Homo sapiens
gagccacagtgtctcagccaggggcagggccggggaactcctgcgaaaaaccacgggccggaggagcagcagccgcgcgggcccagtttccaggttaactaaggtctcagctgtaaaccaaaagtgagaggagacattaagattttcattcttaccgggttgtcttcttcctgaagagcaatggagccgcttttacttggaagaggactaatcgtatatctaatgttcctcctgttaaaattctcaaaagcaattgaaataccatcttcagttcaacaggttccaacaatcataaaacagtcaaaagtccaagttgcctttcccttcgatgagtattttcaaattgaatgtgaagctaaaggaaatccagaaccaacattttcgtggactaaggatggcaaccctttttatttcactgaccatcggataattccatcgaacaattcaggaacattcaggatcccaaacgaggggcacatatctcactttcaagggaaataccgctgctttgcttcaaataaactgggaatcgctatgtcagaagaaatagaatttatagttccaagtgttccaaaattcccaaaagaaaaaattgaccctcttgaagtggaggagggagatccaattgtcctcccatgcaatcctcccaaaggcctcccacctttacacatttattggatgaatattgaattagaacacatcgaacaagatgaaagagtatac

SEQ ID NO: 7591 - DNA, 3741 bp, Homo sapiens
aaaggtttctggtgatgatgtagcatccgaggctcttaggaaatcggggctgcaagcactggcccctgcttggggatggtgggaccctcgcccggagcgtaacgcctgacagtttccacctggatgtttgaggttgtgtagatgtggccggcacccttgagagtggagctagggggtgcagactgagcagtgaacagaaggagccttggacagggctgggccagcctcccgagttccaggagcgaattgcaaacccaccgggaaaatgagcgaagagacggtccccgaggctgcctcgccgccgcccccgcaggggcagccttactttgaccgcttctcagaggacgaccccgagtacatgcgccttcgcaaccgggcggcggacctgcggcaggacttcaacctgatggagcagaagaagcgcgtcaccatgatcctgcagagtccctctttcagggaggagctggaaggcctcatccaggagcagatgaagaaggggaacaactcctccaacatctgggccctgcgacagatcgcggacttcatggccagcacctcccacgcagtcttcccgacatcttccatgaatgtctccatgatgacgcctatcaatgacctccacacagctgactccctgaacctggccaaaggggagcggctcatgcggtgcaagatcagcagtgtctaccgactcctggacctctatggctgggcccagctgagtgacacctatgtcacgttgagagtcagcaaggagcaggaccacttcctgatcagccctaagggagtttcttgcagtgaagtcacagcgtccagcctgatcaaggtgaacattctgggagaggtggtggagaagggcagcagctgcttcccagtggacaccacaggcttctgtctgcactcggccatctatgcagcgaggcccgacgtgcgctgcatcatccacctgcacacaccggccacagcagcggtgtcggccatgaagtggggcctcctgcctgtctcccacaatgccctgctggtgggggacatggcctattatgacttcaatggggaaatggagcaggaagccgatcggatcaacctgcagaagtgccttggacccacctgcaagatcctggtgctaagaaaccatggagtggttgctctgggtgacacggtagaggaggcattttacaagatcttccacctgcaggctgcatgtgagatacaggtgtcggctctgtccagtgccgggggagtggagaacctcatcctcctggagcaggagaagcaccggccccatgaggtgggctccgtgcagtgggccgggagcacctttgggcctatgcagaagagtcggctgggggagcatgagtttgaggccctcatgaggatgctggacaacctgggctacagaacaggttacacgtatcgccacccctttgttcaagagaaaaccaaacacaaaagtgaggtggagattccagccacggtcacagccttcgtgtttgaggaggacggtgccccggtgcccgccctgcgacagcatgcccagaagcagcagaaggagaagacccgctggctcaatacgcccaacacctacctgcgggtcaatgtggccgatgaggtccagaggagcatgggcagcccccgacccaagaccacgtggatgaaggctgacgaggtggagaaatccagcagtggcatgccgattcgcatcgaaaacccaaaccaatttgtgcctctctatactgacccccaggaagtactggagatgaggaacaagattcgagaacaaaaccgacaagatgtgaagtcagcggggcctcagtcccagctcctggcgagcgtcattgccgagaagagccgaagcccgtctacagagagccagctgatgtccaagggagacgaggataccaaagacgattcagaggagacggtgcccaaccccttcagccaactcactgaccaggagttggaggagtacaagaaagaggtggagaggaagaaactagaacttgatggagagaaagaaactgccccagaagagcctggctcacctgcaaagtctgcacctgcttctccagtgcagagcccagcgaaggaggcagagacaaagagccctttagtctctccttccaagtctttagaggaaggtactaagaagacagaaacaagcaaagccgccaccacagagcccgaaacaacccagccggaaggggtggtggtcaacgggagggaggaggagcagacggcagaggaaatcctcagcaaaggcctgagccagatgaccaccagtgctgacacggatgttgatacctctaaggacaaaaccgagtcggtcaccagcggccccatgtccccagagggctcaccttccaagtctccctcaaagaagaaaaagaaattccgaaccccctccttcctgaaaaagagcaaaaagaaggagaaagtggagtcctgattcatgacacccttgggctccctcctgcctcctctctctcctccccttcccttctcccatctctgtccctgcaagcacagggctaaggagggatagagtaggaccctggaccacattcggaaggggaacttagagatcacccgaccaacccttcgttttacagttgcccaagagaaatcaggtgacttgcccaaggtcacacagctagttagcggcagagcctgcactcgaattcaggtctcctgacttccagtccagtgctccttctactacacaacactgcctagttgtgggctgcctttgtttggatgctgtccaccaatctgagcctagggcaagaaggccagaaatgggccgtgagctctcacaggctcagactaaatcagaggtcaaggcttcccctgagtaaggtccatttcttcccaggaatccaatctcctgtggatggagctatctctacatttaaaaatctcttctcttttccactttgggtccctgccctgctgctcaaagtgactagccaaattgacccctccaacagaaagtaatctttgttcccaagggctgatggcttagcttgtactaccccaaacattaaccctgagctttcttcatggaacctcttgaatgatggatggaagagctataagaggtggtaggcataggggcaagccatgtaagctgaggattggggatggtttcatcaacataagaggccaggaacttgacccctttgaattgtgcatctcaggcacttcaaaactaaaaccaaatttagcataggaaaaagttgtttaatgctcagggcagaaatttggggaagttgaaatcctctgttggctttgggttgtataaggaggatcaaaacaacagaggaaatgctgactttctagctttgcatgacacctggagcaatgcactgtacctgcctcactcctgtccagtggtcaggtttcccctgaccttccctcacccccagaaacacttgcttacagaccgaaactggcatcttactcttggcaccttgacttgcaccctctgaggttccaactcagtcattctttgtccagcagaggagaatcagaaatgagcccttcaggattaatcctcttgcaccagctctcagagaaatgctgggtatccctgtccttgtccctatctgtccatcctggggcctggtaatggccacagttattgttttaaatgccaacactgtcttctcatgttcttccgtggggcattgattaatgagcatttgttggctcctaaaaattagacaatccattctcttgaaa

SEQ ID NO: 7592 - DNA, 2633 bp, Homo sapiens
ggatcctggacaggcaccccggcttggcgctgtctctccccctcggctcggagaggcccttcggcctgagggagcctcgccgcccgtccccggcacacgcgcagccccggcctctcggcctctgccggagaaacaggatggcccaatggaatcagctacagcagcttgacacacggtacctggagcagctccatcagctctacagtgacagcttcccaatggagctgcggcagtttctggccccttggattgagagtcaagattgggcatatgcggccagcaaagaatcacatgccactttggtgtttcataatctcctgggagagattgaccagcagtatagccgcttcctgcaagagtcgaatgttctctatcagcacaatctacgaagaatcaagcagtttcttcagagcaggtatcttgagaagccaatggagattgcccggattgtggcccggtgcctgtgggaagaatcacgccttctacagactgcagccactgcggcccagcaagggggccaggccaaccaccccacagcagccgtggtgacggagaagcagcagatgctggagcagcaccttcaggatgtccggaagagagtgcaggatctagaacagaaaatgaaagtggtagagaatctccaggatgactttgatttcaactataaaaccctcaagagtcaaggagacatgcaagatctgaatggaaacaaccagtcagtgaccaggcagaagatgcagcagctggaacagatgctcactgcgctggaccagatgcggagaagcatcgtgagtgagctggcggggcttttgtcagcgatggagtacgtgcagaaaactctcacggacgaggagctggctgactggaagaggcggcaacagattgcctgcattggaggcccgcccaacatctgcctagatcggctagaaaactggataacgtcattagcagaatctcaacttcagacccgtcaacaaattaagaaactggaggagttgcagcaaaaagtttcctacaaaggggaccccattgtacagcaccggccgatgctggaggagagaatcgtggagctgtttagaaacttaatgaaaagtgcctttgtggtggagcggcagccctgcatgcccatgcatcctgaccggcccctcgtcatcaagaccggcgtccagttcactactaaagtcaggttgctggtcaaattccctgagttgaattatcagcttaaaattaaagtgtgcattgacaaagactctggggacgttgcagctctcagaggatcccggaaatttaacattctgggcacaaacacaaaagtgatgaacatggaagaatccaacaacggcagcctctctgcagaattcaaacacttgaccctgagggagcagagatgtgggaatgggggccgagccaattgtgatgcttccctgattgtgactgaggagctgcacctgatcacctttgagaccgaggtgtatcaccaaggcctcaagattgacctagagacccactccttgccagttgtggtgatctccaacatctgtcagatgccaaatgcctgggcgtccatcctgtggtacaacatgctgaccaacaatcccaagaatgtaaacttttttaccaagcccccaattggaacctgggatcaagtggccgaggtcctgagctggcagttctcctccaccaccaagcgaggactgagcatcgagcagctgactacactggcagagaaactcttgggacctggtgtgaattattcagggtgtcagatcacatgggctaaattttgcaaagaaaacatggctggcaagggcttctccttctgggtctggctggacaatatcattgaccttgtgaaaaagtacatcctggccctttggaacgaagggtacatcatgggctttatcagtaaggagcgggagcgggccatcttgagcactaagcctccaggcaccttcctgctaagattcagtgaaagcagcaaagaaggaggcgtcactttcacttgggtggagaaggacatcagcggtaagacccagatccagtccgtggaaccatacacaaagcagcagctgaacaacatgtcatttgctgaaatcatcatgggctataagatcatggatgctaccaatatcctggtgtctccactggtctatctctatcctgacattcccaaggaggaggcattcggaaagtattgtcggccagagagccaggagcatcctgaagctgacccaggcgctgccccatacctgaagaccaagtttatctgtgtgacaccaacgacctgcagcaataccattgacctgccgatgtccccccgcactttagattcattgatgcagtttggaaataatggtgaaggtgctgaaccctcagcaggagggcagtttgagtccctcacctttgacatggagttgacctcggagtgcgctacctcccccatgtgaggagctgagaacggaagctgcagaaagatacgactgaggcgcctacctgcattctgccacccctcacacagccaaaccccagatcatctgaaactactaactttgtggttccagattttttttaatctcctacttctgctatctttgagcaatctgggcacttttaaaaatagagaaatgagtgaa

SEQ ID NO: 7593 - DNA, 1978 bp, Homo sapiens
cggttctttccggaaattatgactgcagctgttttcactccgctgtgactcagagcgctccgggctgcaggagaggaagcccagcctgttctaccagagaacttgcccaggtcagaggtctgcgtagaagcccttttctgagcatcctctcctctcctcacacctgccactgtcctctgcgttgctgtcgaattaaatcttgcatcaccatggtgcacttctgtggcctactcaccctccaccgggagccagtgccgctgaagagtatctctgtgagcgtgaacatttacgagtttgtggctggtgtgtctgcaactttgaactacgagaatgaggagaaagttcctttggaggccttctttgtgttccccatggatgaagactctgctgtttacagctttgaggccttggtggatgggaagaaaattgtagcagaattacaagacaagatgaaggcccgcaccaactatgagaaagccatctcccagggccaccaggccttcttattggagggggacagcagctccagggatgtcttctcttgcaatgtgggtaacctccaacctgggtcgaaggcggcagtcaccctgaagtatgtgcaggagctgcctctggaagcagatggggctctgcgctttgtgctcccagctgtcctgaatcctagataccagttctctgggtcgtctaaggacagttgccttaatgtgaagactcctatagtccctgtggaggacctgccctacacactcagcatggtcgccaccatagattcccagcatggcattgagaaggtccaatccaactgccccttgagtcctaccgagtacctaggagaggacaagacttctgctcaggtttccctggctgctggacacaagtttgatcgggacgtggaactcctgatttactacaatgaggtgcatacccccagcgtggttttggagatggggatgcctaacatgaagccaggtcatttgatgggagatccatctgcaatggtgagtttctatccaaatatcccagaagatcaaccatcaaatacctgtggagagtttatctttctcatggaccgctcgggaagtatgcagagccccatgagtagccaggatacatctcagctgcgaatacaggcagccaaggaaacactgattttgctgctgaagagtttacctataggctgttatttcaacatctatggatttggctcttcctatgaggcatgctttccggagagtgtgaagtacactcagcaaacaatggaggaggctctggggagagtgaagcttatgcaggccgacctagggggcactgaaatcttggcaccactccagaacatttacaggggaccctccatcccaggccaccccctacagctttttgtctttacagatggagaagttacagacacgtttagtgtaattaaagaagttaggatcaacagacagaaacacaggtaggaagaaaatgtgatttccgggtgattggtgctgagtagtgacacacagactctagtgctacatgatgccggtgttgaccttccttcaagaggaccaaatgatttcagaatttagttttagcagctgaaaatttatttctccctgtaaacgttaaaaacagttttccaaataacatcaacaacacagcaaaaccattgtttcttattctttctaaactacaacgaacacaagaattgaatagtaagatgttaattttttttactataaacatttttagagaagtaaaacatgctgaaaactacacaaattataagcatacaactggactcattatcacagtgaatgcactgtgtgatcgccacataggtaaaaactggaatggtcgtaggcctctccatctgtacccttttccatcatgtcctattccctgtcactacacactaaaactttcctgacttacaataccatgggttatttatgcttgtttttgaatgaaaataaataagttatacagtatgctt

SEQ ID NO: 7594 - DNA, 2784 bp, Homo sapiens
ggggctagggggtggggctgcagccgggacggggccttcggcagggcctgcgggggcgggacggagcggacccgagtgatacccgggagactagcttggccacaggagacaacgttgaggtacagacaggattattcaagatcaggttgtagccattttcaacaaggatcactgatcaaaattttctttttacaaagagatttacaagttaaacatgaagggaaaatactggaatcatttggattctgacaggataaagaatacaatatttcacatttacttgtaatggaacctttgtaagattcatcacttgtcattcacccagttgggaacatggatgttggtttttctcgtactactgttcagacactgtcaagaagccactgcaaaaacatcaaacaaaaaatttctcaatgggaaggaagggctaatggtatatctaatccagaaaagtggtgtccaaaggactttggagtgagatataactgtcaccaagagatccgtcttaagaaaaatcctatagctgagagaaagagcaaaaacttggatgtaaccagccgtgaaaatgtgggtctagatataaatgaaaataccaaaagccatgatcaaagtgagaatgaaaataagaaacatgaatatgacgatacacacttctttaaaaatgaatcagaatccaactgggtatgttctcgggtcaaagaaattgaaagctgtaaagaagatgtcttagatccagagacttcattacctccaggaaacttctatacctcacaaatactgtggaagaaaatagaagcacttcccccagataaactcttaaatttggctttagaacattgtgactcttcagaaaaagaactgaacttcagagttctggatagttcatacggaataaccaagagcttagaaaatatttactctgaacctgaggggcaagaatgtggaccttccataaatcctttgccaaaacctcgtaggacattcagatatttatccgaatctggtgttacgccgtataaagaaagaaactgtgacaaaaaatactgtgaaaataactcttgtgcacaatcttctttggcctcttctcaggaacctgaaccaaagaaatatggtggaaaaatcagaggaagatctaaaaggaaatcctttgaatttgaggatattcagcactttcgaaatcggaactcacagacgattcgtgaagaacttggaagaaattctgggtcagcactttattacacacagtctgaggacaatatctatgaagatatcatatatcccaccaaagaaaatccatatgaagatattccagtgcagcctttacctatgtggagatccccttcagcatggaagctaccacccgctaaaagtgcttttaaagcacccaagctccctccaaaacctcagttccttcaccggaagactatggaagtaaagaactcacaggcttatttgcggtcaaagcttacaaaagatacaactttgccggtcactttaacggaatggaagcttttccgagctggtgaagttgcaaacacgaaaaggaaaaatcttccaaggcttgtattgaaaatagatgacatatttgaatctaaaagagggaagaagaaggtaaagttacattcttacactggaaaggaattacctccgacaaaaggtgaaaccagtgggaacgaaagtgatgccgagtatctgccaaagaatcgccataaacgcttagcacaactgcaaccgtcttccaagaggaatcctcactaccagaccttggagcgggatcttattgaattacaggagcagcagctgtttgaactttttgtggtggtgtctctacagaagaaaccatcaggaataagctatattccccaggtcatacaacaattccctggcaaggatgatcatggctataagcagtccaaagacatggaagagagacttaaagttattccaaaattttgttttcctgattcaaaggactggatgccaacctcagaactcaagagtgaaacattctcctttgtcttgactggtgaagatggaagccggtggtttggttactgtaagaagctcttgccagtaggcaaaggaaagcgactccctgaggtatactgcatggttagtcgcctaggctgcttcaatcttttttcaaagattctggatgaagtagagaagagaagagaaatgtctccagcccttgtttacccattcatgcgaagtgtcatggaagctcctttcccagctcctggacgcaccatcacactccaggacctacccattgaagaggtgctgatagttgatctctgtgcagacaagttcttacaggaggtatctgatgaggatgaaattctaccaccaaaacttcaagctgccctgatgcagattttggaagaacgaaatgaaatcttgactcaggagcagaatttttcacaagatgtgacactcaactctctggtgtccgaagcatttgtcaggttttttgtggagttggtaggacattattctttgaacatgactgtcactgagcgtggggagcgtgttttccaaagggaaccattccgtaagtcccacacctcccgaagtgtacgccacttcctggatctcttcatggaaactcagatgtttgcaggattcatccaggaccgagagcttcggaaaagtggagttaaaggtttgtttgagatccgggccatccagtatttggaaacaattcctgagtcggagcccagtgggatgaatagaattttgcggagtcttggttacaaaatgaaatttctgcaaaagaaatga

SEQ ID NO: 7595 - DNA, 6039 bp, Homo sapiens
gcggccgcttcccaccgtccctctccccttactggcagagcgcgctgcgggcggactcccgggcccggagcagcccaccggccaccccaccgcccacccggctcccggtgtctcctcccggccgctctacccagcaactttccgtgctttgttccccgactggaaatgctttacggaagcgtcttggacagggtctccgccaggcgacaagagctcggtgctgagatgtgttacgttctcatctccccatcaattatggatggaaacaaataaggaagagtcaattttgctgagccccttctccggcaacgagaggcgttctgcagccgggagggagccgccgctcgcgccggcagccgctggcaggggcatggtgaggaggaaggtagctcagtggcatttctgagcaggggccaccctgacttcaccttggcccaccatgagggtcttcctgctttgtgcctacatactgctgctgatggtttcccagttgagggcagtcagctttcctgaagatgatgaaccccttaatactgtcgactatcactattcaaggcaatatccggtttttagaggacgcccttcaggcaatgaatcgcagcacaggctggactttcagctgatgttgaaaattcgagacacactttatattgctggcagggatcaagtttatacagtaaacttaaatgaaatgcccaaaacagaagtaatacccaacaagaaactgacatggcgatcaagacaacaggatcgagaaaactgtgctatgaaaggcaagcataaagatgaatgccacaactttatcaaagtatttgttccaagaaacgatgagatggtttttgtttgtggtaccaatgcattcaatcccatgtgtagatactacaggttgagtaccttagaatatgatggggaagaaattagtggcctggcaagatgcccatttgatgccagacaaaccaatgttgccctctttgctgatgggaagctgtattctgccacagtggctgacttcttggccagcgatgccgttatttatcgaagcatgggtgatggatctgcccttcgcacaataaaatatgattccaaatggataaaagagccacactttcttcatgccatagaatatggaaactatgtctatttcttctttcgagaaatcgctgtcgaacataataatttaggcaaggctgtgtattcccgcgtggcccgcatatgtaaaaacgacatgggtggttcccagcgggtcctggagaaacactggacttcatttctaaaggctcggctgaactgttctgtccctggagattcgtttttctactttgatgttctgcagtctattacagacataatacaaatcaatggcatccccactgtggtcggggtgtttaccacgcagctcaatagcatccctggttctgctgtctgtgcatttagcatggatgacattgaaaaagtattcaaaggacggtttaaggaacagaaaactccagattctgtttggacagcagttcccgaagacaaagtgccaaagccaaggcctggctgttgtgcaaaacacggccttgccgaagcttataaaacctccatcgatttcccggatgaaactctgtcattcatcaaatctcatcccctgatggactctgccgttccacccattgccgatgagccctggttcacaaagactcgggtcaggtacagactgacggccatctcagtggaccattcagccggaccctaccagaactacacagtcatctttgttggctctgaagctggcatggtacttaaagttctggcaaagaccagtcctttctctttgaacgacagcgtattactggaagagattgaagcctacaaccatgcaaagtgcagtgctgagaatgaggaagacaaaaaggtcatctcattacagttggataaagatcaccacgctttatatgtggcgttctctagctgcattatccgcatccccctcagtcgctgtgagcgttatggatcatgtaaaaagtcttgtattgcatctcgtgacccgtattgtggctggttaagccagggatcctgtggtagagtgaccccagggatgcttgctgaaggatatgaacaagacacagaattcggcaacacagctcatctaggggactgccatgacatggaggtatcttcatcttctgttaccacaatggcaagtatcccagaaatcacacctaaagtgattgatacctggagacctaaactgacaagctctcggaaatttgtagttcaagatgatccaaacacttctgattttactgatcctttatcgggtatcccaaagggtgtacgatgggaagtccagtctggagagtccaaccagatggtccacatgaatgtcctcatcacctgtgtctttgctgcttttgttttgggggcattcattgcaggtgtggcagtatactgctatcgagacatgtttgttcggaaaaacagaaagatccataaagatgcagagtccgcccagtcatgcacagactccagtggaagttttgccaaactgaatggtctctttgacagccctgtcaaggaataccaacagaatattgattctcctaaactgtatagtaacctgctaaccagtcggaaagagctaccacccaatggagatactaaatccatggtaatggaccatcgagggcaacctccagagttggctgctcttcctactcctgagtctacacccgtgcttcaccagaagaccctgcaggccatgaagagccactcagaaaaggcccatggccatggagcttcaaggaaagaaacccctcagttttttccgtctagtccgccacctcattccccattaagtcatgggcatatccccagtgccattgttcttccaaatgctacccatgactacaacacgtctttctcaaactccaatgctcacaaagctgaaaagaagcttcaaaacattgatcaccctctcacaaagtcatccagtaagagagatcaccggcgttctgttgattccagaaataccctcaatgatctcctgaagcatctgaatgacccaaatagtaaccccaaagccatcatgggagacatccagatggcacaccagaacttaatgctggatcccatgggatcgatgtctgaggtcccacctaaagtccctaaccgggaggcatcgctatactcccctccttcaactctccccagaaatagcccaaccaagcgagtggatgtccccaccactcctggagtcccaatgacttctctggaaagacaaagaggttatcacaaaaattcctcccagaggcactctatatctgctatgcctaaaaacttaaactcaccaaatggtgttttgttatccagacagcctagtatgaaccgtggaggatatatgcccacccccactggggcgaaggtggactatattcagggaacaccagtgagtgttcatctgcagccttccctctccagacagagcagctacaccagtaatggcactcttcctaggacgggactaaagaggacgccgtccttaaaacctgacgtgccaccaaagccttcctttgttcctcaaaccccatctgtcagaccactgaacaaatacacatactaggcctcaagtgtgctattcccatgtggctttatcctgtccgtgttgttgagaggatgatgttgtaagggtaccttaaaacaagagactcgcttgtattttaagagaaccaagtggccaaagaaactctttctaactttggcaacatcagaacttgccacatgtagctactgcagcaaggcttctgtgtacttgcctgaaaacaaaggaaggtgctggtcattccatttcttttgtttgaagctaaagagatgtgtagctcacaggggctaccttaccagtataaagagctgataacagtactcagaagaatctgtgaacaaatacttgaaaatgggttcaatgtagactgccattatgtgtggtcttcccattaaatgtgaacattttaatatgtatgcattcaccttgcctcttgcacaaatgtcaaaaaaaagatggtaatatctcaaagaaatgaacttgtagattaccaagcagtttgctaaaaattcaatctttgacccaagctgtagcatttttttttcatgtgtggcatctttttcatgccaccaacaaacttgttgtgtgtgtgcgtgtgtgtgtgtgtgtgtgtgtgtgtgtgtgtgttctgtacccactaggatttgtttaggtgcccattgcatctttttgtgctatggagttgtttacattaagcatgaccgaacgagagacaatactatttcccacaggagtccattgggttcagctttgaaagaggaatagaatcgaggctcctttgaccatcaaaatgatgaactttacttatgtggtacccaatgccagaatgtaagagttgcaagtgattttgtgctgctattcattaaaacttgtattccagtcttgccagcttaaggagatcaagatattaagaggtatccttgatttattttccagtattcagtagtaaaattttcctgtccactgtgaatcaaagcctgagtcactctatttaaccttggacacactaataaggttttattttgattgtgttcgtttccccccccccaatagtaaaatttctcctcctttaactcctcctaccccccaaggtaagaaacaaaaaacaaacaaacaaacaaaaatagaagacaaaagaaagacatatgaaaggaattgtaattggcttaacagaaacagtctgtaaaaacctaacagtggtgcaatcatgttgtctgtgttgtgttatgtgagaattttctcctaagtcatgcaggtaatgacaatatactgtaaataccacatgtgagtttacctgaatctgtgcattttgtgccttattcatgagaatgatagaagtactaaaatctgtcaagtgttttcagtatagcacattatttactgagtgccagttgtaaatgtttttcaaccagcacctaaaaagactcttttcaaaaaatcacagaaacaacctaggacaattatttgttacataatccgacctcatagcagcattacattctttgccgtgataaacattccactcctgctttcctaaggatgaaacagtgataatgtgaactcaaatgaggtttcctgggtaatgtgacacctgcagaaactatagagcgtcatttatacgtagtttggcagaaaccacttacggctgatgatgcgcaaccctgctgactgtttcagttaatatgctgcacaccacacacttgtttagtgaaccaaatctagaaagtaccaaggcagaggtatgctcctgctgtaatcaggcaaatgagttcaactggatttcttttgacaatactgttggtacctattacttgggggaggacatgttgcagaagaccagatcatttttatacagaatgtgaaatactgatacagttattcttttttttaaagaacattgttttataaagaacgtgatttccagtgatctctggaagcgctaaagctaaaatttctgttcttgaaacacttcagctttgcaactaaaatattacagattaataataaattaaaccaaccaatgataaacactactcagtccaccaacaacaaacgtgtttgaattcaccttaccaatattaatcccagcgtgtgtaaaacagaacagtaactctatgtgaccccagataacattttgtaacattgtgcttccttgtagtttgtaatgtgagttcaatcagtatttatgttgaaatttctaacattaaatctagtctctatcctgttaatttaatttttaaatgctttatccatttgtgcaaaggtaaacgcagattgtatcttttttaatggtacggcataaaaagtaaccctcaagtgaagtgtctctatactgttttatagagtactttaacatgaatagataccttgtaaacttgtattgtggatgtgtaaataatatgtactttgggtttttaacaccgcatgtaaagtcaaaataaaatatacaaatcatt

SEQ ID NO: 7596 - DNA, 4500 bp, Homo sapiens
atgttgaagttgcttttaaacacagcttttctgctttacctgtccaggtagcctctgttttcatttcagtcttaatgaaaactttctaacttatatctcaagtttcttttcaaagcagtgtaagtagtatttaaaatgttatacttcaagaaagaaagactttaacgatattcagcgttggtcttgtaacgctgaaggtaattcattttttaatcggtctgcacagcaagaactgaaacgaatggggattgaactgctttgcctgttctttctatttctaggaaggaatgatcacgtacaaggtggctgtgccctgggaggtgcagaaacctgtgaagactgcctgcttattggacctcagtgtgcctggtgtgctcaggagaattttactcatccatctggagttggcgaaaggtggtgcgcagactctgcaggtgcatgtccgccagactgaggactacccggtggatttgtattacctcatggacctctccgcctccatggatgacgacctcaacacaataaaggagctgggctcccggctttccaaagagatgtctaaattaaccagcaactttagactgggcttcggatcttttgtggaaaaacctgtatccccttttgtgaaaacaacaccagaagaaattgccaacccttgcagtagtattccatacttctgtttacctacatttggattcaagcacattttgccattgacaaatgatgctgaaagattcaatgaaattgtgaagaatcagaaaatttctgctaatattgacacacccgaaggtggatttgatgcaattatgcaagctgctgtgtgtaaggaaaaaattggctggcggaatgactccctccacctcctggtctttgtgagtgatgctgattctcattttggaatggacagcaaactagcaggcatcgtcattcctaatgacgggctctgtcacttggacagcaagaatgaatactccatgtcaactgtcttggaatatccaacaattggacaactcattgataaactggtacaaaacaacgtgttattgatcttcgctgtaacccaagaacaagttcatttatatgagaattacgcaaaacttattcctggagctacagtaggtctacttcagaaggactccggaaacattctccagctgatcatctcagcttatgaagaactgcggtctgaggtggaactggaagtattaggagacactgaaggactcaacttgtcatttacagccatctgtaacaacggtaccctcttccaacaccaaaagaaatgctctcacatgaaagtgggagacacagcttccttcagcgtgactgtgaatatcccacactgcgagagaagaagcaggcacattatcataaagcctgtggggctgggggatgccctggaattacttgtcagcccagaatgcaactgcgactgtcagaaagaagtggaagtgaacagctccaaatgtcaccacgggaacggctctttccagtgtggggtgtgtgcctgccaccctggccacatggggcctcgctgtgagtgtggcgaggacatgctgagcacagattcctgcaaggaggccccagatcatccctcctgcagcggaaggggtgactgctactgtgggcagtgtatctgccacttgtctccctatggaaacatttatgggccttattgccagtgtgacaatttctcctgcgtgagacacaaagggctgctctgcggaggtaacggcgactgtgactgtggtgaatgtgtgtgcaggagcggctggactggcgagtactgcaactgcaccaccagcacggactcctgcgtctctgaagatggagtgctctgcagcgggcgcggggactgtgtttgtggcaagtgtgtttgcacaaaccctggagcctcaggaccaacctgtgaacgatgtcctacctgtggtgacccctgtaactctaaacggagctgcattgagtgccacctgtcagcagctggccaagcccgagaagaatgtgtggacaagtgcaaactagctggtgcgaccatcagtgaagaagaagatttctcaaaggatggttctgtttcctgctctctgcaaggagaaaatgaatgtcttattacattcctaataactacagataatgaggggaaaaccatcattcacagcatcaatgaaaaagattgtccgaagcctccaaacattcccatgatcatgttaggggtttccctggctattcttctcatcggggttgtcctactgtgcatctggaagctactggtgtcatttcatgatcgtaaagaagttgccaaatttgaagcagaacgatcaaaagccaagtggcaaacgggaaccaatccactctacagaggatccacaagtacttttaaaaatgtaacttataaacacagggaaaaacaaaaggtagacctttccacagattgctagaactactttatgcatgaaaaaagtctgtttcactgatatgaaatgttaatgcactatttaatttttttctctttgttgcttcaaaatgaggttggtttaagataataataggacatctgcagataagtcatcctctacatgaaggtgacagactgttggcagtttcaaaataatcaagaagagaaatatccttagcaaagagatgactttggggatcatttgaggaatactaactctgttgcattaatgcttcaaaaaatcatcaaatgattcatgggggcctgatttgcatttgaaaaatgtttgaaattagagtctcatttgtttcaggaatgcagctacctgagttttttgtctcggcaaagtcacaaagcccatatactcacattgtgtgtctatacttgccaattaattctaaacttgtaggaaatatgccctctcttaaaggagaattttttttaaatctctgagaaatgagattctgagtttatttcagctaaaaggttgcaattcttctgaagatatctcaaatataaggttgaaagttaagtgttaataatttttgtgaatttatacacacctaaacgttaagtacacaaatattttatttgttttacaaataaggaataagtaatttataaattaagaagttacctataaaaataaaaagataacaaccctatcatatagcttatttttaaattacctgaaaaacgatattctacactgtttcctttttgactctgagttttcaaactgttacttctcccatatttctcaatccatttcactcagttgcacagtcttttaaaccctgtaattgtcataccaaagtttctttttaaaaaaaaattactttaaatgcttagtttattcaaagagcgatccaataatataaaaggaacatgtgttaaacacaataaaattttaaatggctctaaatcaagcacatcaagagtatacaagtcttaaaggctttttaatacatactcttttcccatctatgtaacccaacttgcacatttcagctgcatgtggtgaatatgcatcatatatttactttaagaggtaagattttacttgcaaaatacatgtgcaaattagggatccatcagttgatggaagagatggactctagaatattatttcttgtggttattactcctttacaaagcactttcgtctcacttgatcctcataaggaaactaaggctcagaatgagtagagctgggttcagaatctagctcttctaactccaagccatctcctctttccactgcaggaaactgcctcttttgtcagtgaaataatagaaagattgtgttagttaagtgataactgtcatttgtttgaaaatgttcgagactgaacaaatagcatttaaactgctggcatatagatgagatattgtacttttgtgcaatgtttattacctttgattaaattgtaatgtgaagcttttactaggtgaatagttcattatgtagtggaggcttcgtggttgtccattgaattgtcacagcaaaatctataagtttcttcaattctacaagatagatccatatacctttgatcacttggagactctttttttgctggtttctagataactcaggtaaatcagacctttacagagtacagggctaggtgaaagaattactgaaaaatcaccttgaaaatccgaagggctgatataccctttatgttcctgactgatgcgcagaacctgggggaaatctacagcaatatacaggttgcaatgctgataacacaacagcaatcctctcctctacgtggacttactgttgtttttttaattattattggaatgggattttagaaaatagaagttacctttgtgtgtgttttagggaaggtagagaagaatctgctctttctctgaatactgttttgaccccaggcaggaccttggaaaggccaaaacattaacagtagtacttctgttcactgaagagttatgttacatgaagataaaatggttttgtcgtgtttattattgtattttgtgttgatataaataaacatggtaatttaaacaatgaa

SEQ ID NO: 7597 - DNA, 10101 bp, Homo sapiens
atgggtggcgggggcacgtgcaccatttcagtgcaggtgagggtctgcacaggaggaaacctgcttgggggccgccgtcgccccttgtccccctgcaacgaggaggtgtggggcgaggcgccccttcccggagccaggccctttaacgcccccccagcccgcagcgcccccgccccatcaggcgtccctgggctccgcctgcccgccccgcatcagcgccacagccggcccggccgcctccggcccacctgcgagctcggagacatgtctctgctttgcgttggagtcaaaaaagccaagtttgatggtgcccaagagaaattcaacacgtacgtgaccctgaaagtgcagaatgtcaagagcacgaccatcgcggtgcggggcagccagcccagctgggagcaggatttcatgttcgagattaaccgtctggatttgggactgacggtggaggtgtggaataagggtctcatctgggacacaatggtgggcactgtgtggatcccactgaggaccatccgccagtccaatgaggagggccctggagagtggctgacgctggactcccaggtcatcatggcagacagtgagatctgtggcaccaaggaccccaccttccaccgcatcctcctggacacgcgctttgagctacccttagacattcctgaagaggaggctcgctactgggccaagaagctggagcagctcaatgctatgcgggaccaggatgaatattcgttccaagatgagcaagacaagcctctgcctgtccccagcaaccagtgctgcaactggaattattttggctggggtgagcagcacaacgatgaccccgacagtgcagtggatgatcgtgacagtgactaccgcagtgaaacgagcaacagcatcccgccgccctattatactacgtcacaacccaacgcctcagtccaccaatattctgttcgcccaccacccctgggctcccgggagtcctacagtgactccatgcacagttacgaggagttctctgagccacaagccctcagccccacgggtagcagccgctatgcctcttccggggagctgagccagggaagctctcagctgagcgaggacttcgaccctgacgagcacagcctgcagggctccgacatggaggatgagcgggaccgggactcctaccactcctgccacagctcggtcagctaccacaaagactcgcctcgctgggaccaggatgaggaagagctggaggaggacctggaggacttcctggaggaggaggagctgcctgaagatgaggaggagctggaggaggaggaggaggaggtgcctgacgatttgggcagctatgcccagcgtgaagacgtagctgtggctgagcccaaagacttcaaacgcatcagcctcccgccagctgccccagggaaggaggacaaggccccagtggcacccaccgaggcccccgacatggccaaggtggcccccaagccagccacgcccgacaaggtgcctgcagctgagcagatccctgaggctgagccacccaaggacgaggagagtttcaggccgagagaggatgaggaaggccaggaggggcaggactccatgtccagggccaaggccaactggctgcgtgccttcaacaaggtgcggatgcagctgcaggaggcccggggagaaggagagatgtctaaatccctatggttcaaaggcggcccagggggcggtctcatcatcatcgacagcatgccagacatccgcaagaggaaacctatcccactcgtgagcgacttggccatgtccctggtccagtccaggaaagcgggcatcacctcggccttggcctccagcacgttgaacaacgaggagctgaaaaaccacgtttacaagaagaccctgcaagccttaatctaccccatctcgtgcacgacgccacacaacttcgaagtgtggacggccaccacgcccacctactgctacgagtgcgaggggctgctgtggggcatcgcgaggcagggcatgcgctgcaccgagtgcggtgtcaagtgccacgagaagtgccaggacctgctcaacgccgactgcctgcagcgggctgcggagaagagctccaagcacggggcggaggaccggacacagaacatcatcatggtgctcaaggaccgcatgaagatccgggagcgcaacaagcccgagatcttcgagctcatccaggagatcttcgcggtgaccaagacggcgcacacgcagcagatgaaggcggtcaagcagagcgtgctggacggcacgtccaagtggtccgccaagatcagcatcaccgtggtctgcgcccagggcttgcaggcaaaggacaagacaggatccagtgacccctatgtcaccgtccaggtcgggaagaccaagaaacggacaaaaaccatctatgggaacctcaacccggtgtgggaggagaatttccactttgaatgtcacaattcctccgaccgcatcaaggtgcgcgtctgggacgaggatgacgacatcaaatcccgcgtgaaacagaggttcaagagggaatctgacgatttcctggggcagacgatcattgaggtgcggacgctcagcggcgagatggacgtgtggtacaacctggacaagcgaactgacaaatctgccgtgtcgggtgccatccggctccacatcagtgtggagatcaaaggcgaggagaaggtggccccgtaccatgtccagtacacctgtctgcatgagaacctgttccacttcgtgaccgacgtgcagaacaatggggtcgtgaagatcccagatgccaagggtgacgatgcctggaaggtttactacgatgagacagcccaggagattgtggacgagtttgccatgcgctacggcgtcgagtccatctaccaagccatgacccactttgcctgcctctcctccaagtatatgtgcccaggggtgcctgccgtcatgagcaccctgctcgccaacatcaatgcctactacgcacacaccaccgcctccaccaacgtgtctgcctccgaccgcttcgccgcctccaactttgggaaagagcgcttcgtgaaactcctggaccagctgcataactccctgcggattgacctctccatgtaccggaataacttcccagccagcagcccggagagactccaggacctcaaatccactgtggaccttctcaccagcatcaccttctttcggatgaaggtacaagaactccagagcccgccccgagccagccaggtggtaaaggactgtgtgaaagcctgccttaattctacctacgagtacatcttcaataactgccatgaactgtacagccgggagtaccagacagacccggccaagaagggggaagttctcccagaggaacaggggcccagcatcaagaacctcgacttctggtccaagctgattaccctcatagtgtccatcattgaggaagacaagaattcctacactccctgcctcaaccagtttccccaggagctgaatgtgggtaaaatcagcgctgaagtgatgtggaatctgtttgcccaagacatgaagtacgccatggaggagcacgacaagcatcgtctatgcaagagtgccgactacatgaacctccacttcaaggtgaaatggctctacaatgagtatgtgacggaacttcccgccttcaaggaccgcgtgcctgagtaccctgcatggtttgaacccttcgtcatccagtggctggatgagaatgaggaggtgtcccgggatttcctgcacggtgccctggagcgagacaagaaggatgggttccagcagacctcagagcatgccctattctcctgctccgtggtggatgttttctcccaactcaaccagagctttgaaatcatcaagaaactcgagtgtcccgaccctcagatcgtggggcactacatgaggcgctttgccaagaccatcagtaatgtgctcctccagtatgcagacatcatctccaaggactttgcctcctactgctccaaggagaaggagaaagtgccctgcattctcatgaataacactcaacagctacgagttcagctggagaagatgttcgaagccatgggaggaaaggagctggatgctgaagccagtgacatcctgaaggagcttcaggtgaaactcaataacgtcttggatgagctcagccgggtgtttgctaccagcttccagccgcacattgaagagtgtgtcaaacagatgggtgacatccttagccaggttaagggcacaggcaatgtgccagccagtgcctgcagcagcgtggcccaggacgcggacaatgtgttgcagcccatcatggacctgctggacagcaacctgaccctctttgccaaaatctgtgagaagactgtgctgaagcgagtgctgaaggagctgtggaagctggttatgaacaccatggagaaaaccatcgtcctgccgcccctcactgaccagacgatgatcgggaacctcttgagaaaacatggcaagggattagaaaagggcagggtgaaattgccaagccactcagacggaacccagatgatcttcaatgcagccaaggagctgggtcagctgtccaaactcaaggatcacatggtacgagaagaagccaagagcttgaccccaaagcagtgcgcggttgttgagttggccctggacaccatcaagcaatatttccacgcgggtggcgtgggcctcaagaagaccttcctggagaagagcccggacctgcaatccttgcgctatgccctgtcgctctacacgcaggccaccgacctgctaatcaagacctttgtacagacgcaatcggcccagggcttgggtgtagaagaccctgtgggtgaagtctctgtccatgttgagctgttcactcatccaggaactggggaacacaaggtcacagtgaaagtggtggctgccaatgacctcaagtggcagacttctggcatcttccggccgttcatcgaggtcaacatcattgggccccagctcagcgacaagaaacgcaagtttgcgaccaaatccaagaacaatagctgggctcccaagtacaatgagagcttccagttcacgctgagcgccgacgcgggtcccgagtgctatgagctgcaggtgtgcgtcaaggactactgcttcgcgcgcgaggaccgcacggtggggctggccgtgctgcagctgcgtgagctggcccagcgcgggagcgccgcctgctggctgccgctcggccgccgcatccacatggacgacacgggcctcacggtgctgcgaatcctctcgcagcgcagcaacgacgaggtggccaaggagttcgtgaagctcaagtcggacacgcgctccgccgaggagggcggtgccgcgcctgcgccttagcgcgggcggtcggccgagcggcactgcgcctgcgcggagggcgctgggcggggagggacggggcttgcgccttggtgggacctccccaggggcggggctcggggggctccacgccaagggtgggctgcgcctacgcccttgactcagctttcccttttggggaattaggaatggaggatgccccgccctctcgggaggccacgcccaagggcgcgacgaaggaaggagccacatccccaacttgaggccacgcccccagcacctagggggcattttgagctgggatgggggaaacctcgtccctatggaggaggccacatcccggggctctggtaccgggaggcaccacctcatgtcccctggaaaagccataagatgggacccagacccctgggaccccagaccaattgccaagtatggaaatctcagctccctcgagggggggccctgggcaaggggtagggctctctggagcgcccctctaggtggcctggggactggagggaccaggatgctggttggagggccccggaataccggagtccctttagatatttgtgcaaaaaataaatggggggaggggggaggatgggatttcaaaagcacatgcgcccttgggcgcccaaaccctgggggccgaggggacggctctggttccccacgctgcccctacttccctttgggagtttgcctctccctctcccccaacaaacccagtcctcatatcatagagttcaacacacccatttgacagatggcaaaactgaggcttaaagagctgcttgagacttggccaaggttccaggtgccataccctctgtgcccctcccttaggcctgtgtgccccatggaagggtgggctgagatcgggatgacctgacacagctccctattgctgctaattccccctcggcctcctccaaggggtgggaattccaggccaagacccctacttcgcctttccttctccggctgccaagcaggacctttgccctcagccctttctcctgggatctccatgggggatgccatgagggcctcccaccacaaaagagaatttgggatcccctggtcccaggtttctccatcccttcttccttttccagaattttccaaataggaaagaacagaaggagaccagaaactctaggggggagaaagagaatgagagaaagagaatgagagagagagaaacacaaacacagtgacacagtgagagcttagtctccaagagcctattcattgattcaaacacccaagccacaggatacctcagatggccctcttgccagctggaagctctttctccaatgagcaaagttacagtgacctggctggagttacctggtgcacataggaccttaggggaaagttcagcgtggactacacttgctctgggatctgcttttccacatgtgtgtatggcacgcctttttctgctggattgggaaggacaagattttgctgtgctagggagaaatgaaaacggggtgagctgagtagctgggtttctggaggatagaacatcagatggggaggctttccgaggtgaagaatgagagggaaccacttactagagagaaaagagctccaggcctggggaacagcacgtgcgaaggccaggagagaagaactgttgaaacaacgagaagggtggcacggctggagctgagccagcaagggggatcgtgaggagccttggggttggggagatctgcagaagcatcagaccaggcagggcctcgtacgcagtcctgaggagttttacttttattctaagacagttggggagctccaggagctgttttaagttggggagagactggattccagcctgcaaaagctgttttgtgaagactaaaaccagtgaggagaggtggaggtgctttggggacactgaaatggattcttggaaagattctgaaggctgtgttgaaaagacacctatagctgtggggacatgactataatcccagcatttggggagaccgaggctggcagatcacttaaggtcaggagtttgagaccagcctggccaacatggcgaaaccccatctctgctaaaaatacaaaaattagctgggtgcagtggtgcatgcctgtagtcccagctactcaggagactgaggcgggagaattgtttgaaccctggaggcagaggttgtagtgagtcgtgatcacacaactgcactccagcctgggcaacagaacaatactccattccctcccctctaccccaccaaaaaaaaaaaaaaatcctgcccttagatgagctctagggctgctgagtacagttgtcccagttgcacagtgcccaagggtttggcattgctaagaaggccacgtgcaaatcctagatattgagtgttgtatgtttgtgacgttggtttcccgacatgtgaatggcccaagtgtctggaagaagtggcgccactttctaatttgcttggagatgttgcatgtcccttaaattcagacaggtgcaggtaactggaggttctgaaccaaaggttaaaatgcaaattctcatacagggttgggaagttgtagccagggataagcttatgtgactgttatatggactgaggagcagatgtgaatttcgaaccatgacatggctgagggtaggggtcgggtggatggatgattcagggttgtaacccatagagcccaaaggggaagtgatctgtgacctggggtgagggtgatctggaagatttttggatggctggaaagaaatggggaagtcgagctgcctgagagagccaagttatttcccaaaagattccttaggagtctttctgttcaagacctccgtgtgtgtgtgtgtgtgtttagggttccccagcaatggcccaggcatgtgaaggaaacaagcttcttcagggaatatttgttgaatgagttttcctgactcccaggctagaactgtttttgcaatttccaccctcttttctttcccccagagaactcctattcgtccttcaaaacccatcacggaaacccctcttggagaaaaccctccttccttcccctcaggactttcccagccaccgtctctcctccagtccagcctgatgccatgggactgggggtttctctgtccagctctgtttctcccagactggggtctgaggactctcaggacccccaactttacctagcacaggctgggcacaagtgggtgacagggagtctacgcctagtggaattatgtattggggcagggtcagtgtgagaatacacatccgcatgcatgtctgtccatgtctgtccgtaccaaccttccccttccacacggacctgggcacataggaggtgtctgagcctgacacatgggacagagagtggacatggctgagacacggacagagaaaagacaaggagtccagggggctgaaagccttttgaaatcaggaagttcctgtattggcagaacaaagcccagagaggagcagggctttcctcaacgccacccagcaagtggacacagagcccggccttggatgacacctccagggttctgaaccctggacctcgctttatgcaaggagctggccccacatttccatgaatcggggaaacagcacaagaaggttggcctgtggcagggcaagggttaaaggggtgacattgagggatgcctcagagtcaaagtcccctgaccaagaggaatagagtagaaaacacagagacagagggtgagatcacgccccgatgaggacggagagagacagagatggagagagacatagaggtggaaatatacagagaaagataaatgcagagaccaaggcagggagtgtcgggggaagtaaagagggtgtcctgaagaaagaaggatctgttcactcttaccagtctgtcctcgaatgatttgcataaaatgaggaggtgcctgtccacacccccaattcctctctcaggccccagagcctgagacctcaccatgcccccatcagagatgcaaaaaactaaacacccaactagaaatccttgggacctctctcggctgggatctcagagcctttctgtcccctacccctaccccatgtgctgtcgattttgcagatggggacaacctggggcctcccggaactctgccaccctggggaagttgggggagggccttagtcccggatcacaaccccgtctgctccccagaatcctttcctaagaatcgttgaggaccaaagttgtctttgctgacacgtgttgcttttctctttgccttttattgtttcagagaaaaatcaagttgactgtgtcaagtaacaccccaccccttacccccgtccagccatagtggctctctggagacacaggtcacaggcggagggtcccctgatcatccccaaccacacagccagggggacttgacccctgtccacccctgtctcgtgctccctcagacccccacaaaccggccaagcagtccggggaggcttcccctccacacaactcttagcatgtgattgcagatgtgaaatcaaaacgttgtttgttttttgttttgttttgattctaccccgtcggtccagtgtctgcacagacgccttcatttctctgtaaatatgtgacttggaacaaatgtttaacacaaacgagaagtggtcatgaatgcatggtgttgagatgttttgcactattctgactttttggtctctgtaaaaatattttattaacagcagacattaaaaaaagaaaaaccacacacagccttgg

SEQ ID NO: 7598 - DNA, 1229 bp, Homo sapiens
gtggggagccgggccctcttgagatgaggcgtgcgggagggtcctgagcactttagctcgcctaggatttgagctggggtgtgtgtctgctcccagctcaagtccctccgagtgccagagaggaaggcagggagaagcggagcacccctctttgggccaaggccaaggaggactgtgcttgccgggattgctgtccttgccattggactatggctccgattcgactctcagaccaagagcatcttcgagcaagaaactaataataataattccagcttctacacaggagtctatattctgatcggagccggcgccctcatgatgctggtgggcttcctgggctgctgcggggctgtgcaggagtcccagtgcatgctgggactgttcttcggcttcctcttggtgatattcgccattgaaatagctgcggccatctggggatattcccacaaggatgaggtgattaaggaagtccaggagttttacaaggacacctacaacaagctgaaaaccaaggatgagccccagcgggaaacgctgaaagccatccactatgcgttgaactgctgtggtttggctgggggcgtggaacagtttatctcagacatctgccccaagaaggacgtactcgaaaccttcaccgtgaagtcctgtcctgatgccatcaaagaggtcttcgacaataaattccacatcatcggcgcagtgggcatcggcattgccgtggtcatgatatttggcatgatcttcagtatgatcttgtgctgtgctatccgcaggaaccgcgagatggtctagagtcagcttacatccctgagcaggaaagtttacccatgaagattggtgggattttttgtttgtttgttttgttttgtttgttgtttgttgtttgtttttttgccactaattttagtattcattctgcattgctagataaaagctgaagttactttatgtttgtcttttaatgcttcattcaatattgacatttgtagttgagcggggggtttggtttgctttggtttatattttttcagttgtttgtttttgcttgttatattaagcagaaatcctgcaatgaaaggtactatatttgctagactctagacaagatattgtacataaaagaatttttttgtctttaaatagatacaaatgtctatcaactttaatcaagttgtaacttatattgaagacaatttgatacataataaaaaattatgacaatg

SEQ ID NO: 7599 - DNA, 859 bp, Homo sapiens; identical to SEQ ID NO: 554

SEQ ID NO: 7600 - DNA, 913 bp, Homo sapiens
tccctctcagtggccatcttttctgttgggggcatgattggctccttctctgtgggccttttcgttaaccgctttggccgggtattacctctgacccagcccctcggagcccaaggaatgtgggcactggcctgacctgtgaccccgtccccaggcggaattcaatgctgatgatgaacctgctggccttcgtgtccgccgtgctcatgggcttctcgaaactgggcaagtcctttgagatgctgatcctgggccgcttcatcatcggtgtgtactgcggcctgaccacaggcttcgtgcccatgtatgtgggtgaagtgtcacccacagcccttcgtggggccctgggcaccctgcaccagctgggcatcgtcgtcggcatcctcatcgcccaggtgttcggcctggactccatcatgggcaacaaggacctgtggcccctgctgctgagcatcatcttcatcccggccctgctgcagtgcatcgtgctgcccttctgccccgagagtccccgcttcctgctcatcaaccgcaacgaggagaaccgggccaagagtgtgctaaagaagctgcgcgggacagctgacgtgacccatgacctgcaggagatgaaggaagagagtcggcagatgatgcgggagaagaaggtcaccatcctggagctgttccgctcccccgcctaccgccagcccatcctcatcgctgtggtgctgcagctgtcccagcagctgtctggcatcaacgctgtcttctattactccacgagcatcttcgagaaggcgggggtgcagcagcctgtgtatgccaccattggctccggtatcgtcaacacggccttcactgtcgtgtcggtgagtctttgcttactggcccccccagccaaaccccagggaggaggcagtgccatcttccc

SEQ ID NO: 7601 - DNA, 1554 bp, Homo sapiens
ctgcccagccctcagctgtgttattattcggtgataggtatttgctaattacttccaaaagcctcccatctgtcatcccacccagactgcgcgcttctaattcctcctaccccacatgctgtgcccaatgaaaagtatggtcagcgagcgaaggtttgcaaggagacagacgagggcgaaattaagccaggcggcttccctttaaatcctcgcaaagcagaagggcccctcactctggcagcaggccttggccaaggggcctttagccctgacgacccggggaagagtctcccaaagcagaacgcccggtccggcgcccagaccaaacgcgggggaaccggaagggcgaggcctccaccgccaggtcccgccagtcccagctgcgcgcgccccccagtcccgcacccgttcggcccaggctaagttagccctcaccatgccggtcaaaggaggcaccaagtgcatcaaatacctgctgttcggatttaacttcatcttctggcttgccgggattgctgtccttgccattggactatggctccgattcgactctcagaccaagagcatcttcgagcaagaaactaataataataattccagcttctacacaggagtctatattctgatcggagccggcgccctcatgatgctggtgggcttcctgggctgctgcggggctgtgcaggagtcccagtgcatgctgggactgttcttcggcttcctcttggtgatattcgccattgaaatagctgcggccatctggggatattcccacaaggatgaggtgattaaggaagtccaggagttttacaaggacacctacaacaagctgaaaaccaaggatgagccccagcgggaaacgctgaaagccatccactatgcgttgaactgctgtggtttggctgggggcgtggaacagtttatctcagacatctgccccaagaaggacgtactcgaaaccttcaccgtgaagtcctgtcctgatgccatcaaagaggtcttcgacaataaattccacatcatcggcgcagtgggcatcggcattgccgtggtcatgatatttggcatgatcttcagtatgatcttgtgctgtgctatccgcaggaaccgcgagatggtctagagtcagcttacatccctgagcaggaaagtttacccatgaagattggtgggattttttgtttgtttgttttgttttgtttgttgtttgttgtttgtttttttgccactaattttagtattcattctgcattgctagataaaagctgaagttactttatgtttgtcttttaatgcttcattcaatattgacatttgtagttgagcggggggtttggtttgctttggtttatattttttcagttgtttgtttttgcttgttatattaagcagaaatcctgcaatgaaaggtactatatttgctagactctagacaagatattgtacataaaagaatttttttgtctttaaatagatacaaatgtctatcaactttaatcaagttgtaacttatattgaagacaatttgatacataataaaaaattatgacaatg

SEQ ID NO: 7602 - DNA, 2485 bp, Homo sapiens
atccgtttcctttgcaggaaacacaggctggaagcaagacctgacctgagggagttcttcagccttaacctaaggtctcatactcggagcactatgacatcgccccagctagagtggactctgcagacccttctggagcagctgaacgaggatgaattaaagagtttcaaatcccttttatgggcttttcccctcgaagacgtgctacagaagaccccatggtctgaggtggaagaggctgatggcaagaaactggcagaaattctggtcaacacctcctcagaaaattggataaggaatgcgactgtgaacatcttggaagagatgaatctcacggaattgtgtaagatggcaaaggctgagatgatggaggaggacaggagggcctatttcctgagacactttggagacgaggaccaagccatgcgtgcctttgagctaatgaggagcaacgcggccctgttccagctgggctcggcccccgcggtgtgctggattgtgtgcacgactctgaagctgcagatggagaagggggaggacccggtccccacctgcctcacccgcacggggctgttcctgcgtttcctctgcagccggttcccgcagggcgcacagctgcggggcgcgctgcggacgctgagcctcctggccgcgcagggcctgtgggcgcagatgtccgtgttccaccgagaggacctggaaaggctcggggtgcaggagtccgacctccgtctgttcctggacggagacatcctccgccaggacagagtctccaaaggctgctactccttcatccacctcagcttccagcagtttctcactgccctgttctacgccctggagaaggaggagggggaggacagggacggccacgcctgggacatcggggacgtacagaagctgctttccggagaagaaagactcaagaaccccgacctgattcaagtaggacacttcttattcggcctcgctaacgagaagagagccaaggagttggaggccacttttggctgccggatgtcaccggacatcaaacaggaattgctgcaatgcaaagcacatcttcatgcaaataagcccttatccgtgaccgacctgaaggaggtcttgggctgcctgtatgagtctcaggaggaggagctggcgaaggtggtggtggccccgttcaaggaaatttctattcacctgacaaatacttctgaagtgatgcattgttccttcagcctgaagcattgtcaagacttgcagaaactctcactgcaggtagcaaagggggtgttcctggagaattacatggattttgaactggacattgaatttgaaaggtgcacttacctaaccattccgaactgggctcggcaggatcttcgctctcttcgcctctggacagatttctgctctctcttcagctcaaacagcaacctcaagtttctggaagtgaaacaaagcttcctgagtgactcttctgtgcggattctttgtgaccacgtaacccgtagcacctgtcatctgcagaaagtggagattaaaaacgtcacccctgacaccgcgtaccgggacttctgtcttgctttcattgggaagaagaccctcacgcacctgaccctggcagggcacatcgagtgggaacgcacgatgatgctgatgctgtgtgacctgctcagaaatcataaatgcaacctgcagtacctgaggttgggaggtcactgtgccaccccggagcagtgggctgaattcttctatgtcctcaaagccaaccagtccctgaagcacctgcgtctctcagccaatgtgctcctggatgagggtgccatgttgctgtacaagaccatgacacgcccaaaacacttcctgcagatgttgtcgttggaaaactgtcgtcttacagaagccagttgcaaggaccttgctgctgtcttggttgtcagcaagaagctgacacacctgtgcttggccaagaaccccattggggatacaggggtgaagtttctgtgtgagggcttgagttaccctgattgtaaactgcagcctcacaaacctggacttgagtatcaaccagatagctcgtggattgtggattctctgtcaggcattagagaatccaaactgtaacctaaaacacctacggttgaagacctatgaaactaatttggaaatcaagaagctgttggaggaagtgaaagaaaagaatcccaagctgactattgattgcaatgcttccggggcaacggcacctccgtgctgtgactttttttgctgagcagcctgggatcgctctacgaattacacaggaagcgggattcgggtctctaagatgtcttatgaatgcaggtcagagggtcacatgttaacactagagtctgtcgagaggtaggatttgacactggttttctcactatttttgggagattctgcacgagtcacgcacccccttcacatgacgctatgtactttctcacagggataataaagttagagcactctc

SEQ ID NO: 7603 - DNA, 505 bp, Homo sapiens
aatgctgaaggcaaagcaaaagatggtgattttggataaatgagaaaaaggagagagtaataggaagacaagcaagaatcacaaaaggaagcacgctaggtaatatacgatcctcccagagaaaattcctgttccaagagaaaataaggcaacatcaatgaaggagagaagagccagccagaaattatccagcaaatctatcatggatcctaatcagaacgtgaaatgcaagatagttgtggtgggagacagtcagtgtggaaaaactgcgctgctccatgtcttcgccaaggactgcttccccgagaattacgttcctacagtgtttgagaattacacggccagttttgaaatcgacacacaaagaatagagttgagcctgtgggacacttcgggttctccttactatgacaatgtccgccccctctcttaccctgattcggatgctgtgctgatttgctttgacatcagtagaccagagaccctggacagtgtcctcaaaaag

SEQ ID NO: 7604 - DNA, 3445 bp, Homo sapiens
ctgggccgaccaatcagcgaggagcgcgggcagccggggcggctgctgctctcgtgagaacagaggacccaggccctcggaggagcttcgcggtgccagcctctgcaggtcctctgagggagcaacatcagggctccctcaggttcagaggtcgcctctagcttcccaggccagtcagccacggagcccgtgggcaggaagggcagcaggatggctgccaaggaccagttggaggttcaagttatggccgcccaggaaatggagcttgcaggaaaggatccagtaagtcatgagcatgaggaaagaaaacctgttacagagacaaaggagggagatgtaactgatgagcatggggaaagaggatcttttgctgaaacagatgaacacacgggggttgataccaaggagctagaagatattgcaggtatgttttacgagctatttgtggtttatgaaaattgttttcaaccatacaacccttacagtaggttatatgaattagtggatgacaagactgtcttaaatgccttcttctcatatatagcatttaatgtaatctgtttaataatttttcttacttacttttttaattgttgatgtggaatgtgagaatgcttctaataatggtgaagcaagaggggtggcttttctttcatacacgtggaaatttaattgtttgggggatattagaggacattggaggagaaacagctctattcgttcctttcagtgtacacacattaagtcatatatcaggtttttttttagcttttactttatgtttgggggtacatgtgcaggttcgttatatagataaattgcgtgtcacaggggtttggtatacagattattttgtcacccagattataagcatcgtacctgatgggtggttttccatcctcaccttcctcctaccctccaacctcaagtaggcccaggtgtgtgttgttcacctcttcctgtccgtatgtactcagtttttaatatgagtttttcatcttcctaatttagctattgtcacaactttctaattttgttttctttaaagtaccagagaaaattgaattctctaaaatgatgattttctattattattccagtaacaagctgtgtagtagaaaaggaaagacaacttttctacccagtgagaagcatacaattggatccaaaaactcataaactttatattgccatgtgaaatattagttgcactgttatgggaccatattttcaaaaaagtttgagaaaatttctgtagagattatgaagacaatactcttatttttaaaaagcttactttagttttcagctcttctatagcgataattcatataagcagtatatttggaaagctttgctctgcttggtggtgacaaagtgccggttttgtctaatacaatgagcattatagatggatactgtatgtaaaaaaatttgtattatggtgcagctcttttatgattgctcaaaactattctcagcaattgatggtagatctctcatgtgaaaccatgtttaggaaagcattccttgcagtattacagttttctgaaacactgcactgtggataaaaatgtcatataaaaagctctcagaaaatatttcaaatgtgttttgaatgtatttatctatttaaacctaaatgtttacacccatggacattgcttcttttattaaaatatagttaatagcatcaactattgattaaaaatactttctttattgtgtattaagttatttctacccttttgatggtcttattaaatcagatacttttttgtgctttacataatgagttgtgacagtatttcacggaaacatgtcctttgaattgtaggacattttataaatgtagaaattaaagtctgtggctgggcacggttgctcacacctgtaatcccagcactttgggaggccgaggtgggtggatcacgaggtcaggagatcaagaccatcctggctaacacggtgaaaccccgtctccactaaaaatataaaaattagccgggcgtggtggcgggcgcctgtagtcccagctactcgggaggctaaggcaggagaatggcgtgaacccgggaggcggaggctgcagtgagccaagatcgtgccacagcactccagcctgggtgacagagcgagactctgtctcaaaaaaaaaaaaaaagaaattaaagtctgtgtttgtaaccctttctgcacacttaaaaaatagaaacttttaattatttgctttttttcattatctgtcaattaagtgatttgctgttataccaactgaaattggaatactaatacctgaaaggttttacataaagtaagtaaatcttgctttttgaaatgatctttgcattttacattttaaatgtccttctgatattgctgaaccatcaagtcccatattgattttaatatatgcaaagaaactacttttcaacatgaacatttaatgcatattcatttactatctagctgacattaaagagcatcttgctgcaaagagaaaaaggattgaaaagattgcaaaagcttgcagcgaaataaagaacagaattaaaaatgttttgagaacaacacaactaaaaaggtatgattgttggcttttttgaataatgatatttatatcatttctttgtattcattggtgcaaataatttccagaactatcctgtacatattggtgtctctagggaacaacatattttacttgattgttccctaaacaggtaagtttctttagttttataacctcaatttaacagaattgagagatattacctagaagccaatgaagatgacctctttttgccttccagataaaaagtcttcctgtaaaattaatgtttatccatttctagaaatacggcagaaacgtgattatagaatttctctgaagttgccgaatgtccttgaagagttcatcacagatgagcagaaagatgaggaaggagatggagaaaaggaagaacaaattaaaatatttcaagagcaacaaaagaggtggcaacaagatgggaaaggaactgaaagagattgagccaccacacgagcaattcacaaagctgcagcaagagttggcacttattcagatgtatcttcaacctctgttattctggtgactgacaaaagaacttgaacctatgttatatgatacatgcataacttgagctacactaaaccacatgacagtgtttagttaattcttgtataaattagtatatctcttctattattagtctgtttgttaaatgccagaccacgtttctatgatctgttgaatgaaccctagacagttctgtgagaaagcagcaattgcacagttacatacacagtcaattaaattttaacattaaagataatttagttttaggtttggcctctgtggatctgtatcagttccaaaatgtggaaagcacgggcatggaaaagtacatttttctctaataaa

SEQ ID NO: 7605 - DNA, 2575 bp, Homo sapiens
atctggcccaggaggcacaaccaggcggcagcggatacaaggccaggcggcggcgggcgggcggacctgcgccctgagcctttctgcgcccgcgggcaccatgagcagccgagtcggggacctgagcccccagcagcaggaagcgctggccaggatcctcctccgctcagttccgggagaacctccaggacctgctgcccatactgcccaatgctgatgactacttcctcctgcgctggctgcgagctcgaaactttgacctgcagaaatccgaagacatgctccgaaggcacatggagttccggaagcaacaagacctggacaacattgtcacatggcagccccctgaggtcatccagctgtatgactcgggtggtctttgtggctacgactacgaaggctgccctgtgtacttcaacatcattgggtccctcgaccccaagggtctcctgctgtcagcctccaagcaggatatgatccggaagcgcatcaaagtctgtgagctgctgttgcatgagtgtgagctgcaaactcagaagctgggcaggaagatcgagatggcgctgatggtgtttgacatggaggggctgagcctgaaacacctgtggaagccagctgtggaggtctaccagcagttttttagcatcctggaagcaaattatcctgagaccctgaagaatttaattgttattcgagccccaaaactgttccccgtggccttcaacttggtcaagtcgttcatgagtgaggagacacgcaggaagattgtgattctgggagacaactggaagcaggagctgacaaaattcatcagccccgaccagctgcctgtggagtttggggggaccatgactgaccccgatggcaaccccaagtgcctgaccaagatcaactatgggggtgaggtgcccaagagctactacctgtgcgagcaggtgaggctgcagtatgagcacacgaggtccgtgggccgcggctcctccctgcaggtggagaacgagatcctgttcccgggctgtgtgctcaggtggcagtttgcttcagatggtggggacatcggctttggggttttcctgaagaccaagatgggggagcagcagagtgctagggagatgacggaggtgctgcccagccagcgctacaatgcccacatggtgcctgaggatgggagcctcacctgcctccaggctggcgtctatgtgcggggtttgtgctccctgatcacctctccatcactgcagatgtcctgcgcttcgacaacacctacagccggatgcatgccaagaagctcagctacactgtggaggtgctgcttcccgacaaggcctctgaggagacgctgcagagtctcaaggcgatgagaccctccccaacacagtgaagaccccagccacctctacctgtgcactccaaccccttcacacccacccctctgacccctgccttcccaggcagggtggtgctggaggtggctgcagagagccacttgtcccacgtcaccatttcatctcattgtaggctcacctggcacagtggccaagcaggaaggggccaccagtgcatagcccatgctgaagattcagacaggaacctctttccctgttcccagagaatgcggctgagaatgagaacgctgaagatgatccagtccactgaggatgggtcctgcttgcagaagctgccctttcacccatcttgacaagatccagccacccaggactcacccatgcctggtgttccagcttcagggggtgtgcgtggttcctaggtcctgtggacatcacagcttcaggcctgaagagcagagaagccctgttctctgcatgtaggaggtcagcaggggtgggcaggcccagctggaggcagctgggtgagggtcctggttccagcagagcactggggcccatccaagtttgttctgccaccactggatggaaaattggaaatggactgggcgtggtggctcacgcctataatcccagcagtttgggaggctgagttgggcagatcacctgagatcaggagttcgggaccagcctgggcaacatggtgaaaccctgtctctactaaaaatacaaaaattagccgggcatggtggcgtgcacctgtaatcccagctactcaggaggctgaggcaggagaatcgcttgtacccaggaggcggaggttgtagtgagctgagatcgtgccactgcactccagcctgggcaacagagccagactccgtctctaaacaaacaaacaaacaaacaaacaaataaagaaagaacattggacatggagaggtggggcctggcatgggtaaccatcagaggaaaaagccatgctcagccttccagttgagtgggtaacgactgagtctccagggaattcccagtgacctcccctccacacctgctgtgatcctgccaacatttagctttggttctcttggcagctgcaccattcatgggtgcatatacgtagagtctgaacaggtgctctgctgctagaaacagcaaaccatctagattaaactcctaaagccagtgccacgaggcattcctgttccaactgggtgtttgagcagattggc

SEQ ID NO: 7606 - DNA, 6287 bp, Homo sapiens
cgcgcgggcgcgggggacggcgcaggggccgcctggctggagcagccagaggggatagcttcgtcgagaacggaggacaccggcggtccagggtcctgggcagtcgcgccagagctgagcggagggcgcggcgcgagaacgaatctttgtgacattctctctcagcattctttatcccctgtttgctgaagacttcgacaaaagctggtcttagctgttggcattctcctgagaaaaggatagcttcagaaatcagaaaaacatttgggaggtgtctagcccagtggaccttctgaagagcaatgctaagaagacgtttggtttaaagaattaaaaggaagaacaacttaagagcttcttcaaagtttcccgcatgaaaattacttaaacgttgcacacaacgtttcacaaaatcttttgtgaaagaagaaaaggaaattcagtgtgtgagtctcagcaggagttaagctaatgcagcttaaaataatgccgaaaaagaagcgcttatctgcgggcagagtgcccctgattctcttcctgtgccagatgattagtgcactggaagtacctcttgatcaaaaatctactgaagtaatggtacagcctccaaccatcacccaacagtctccaaaagattacattattgaccctcgggagaatattgtaatccagtgtgaagccaaagggaaaccgcccccaagcttttcctggacccgtaatgggactcattttgacatcgataaagaccctctggtcaccatgaagcctggcacaggaacgctcataattaacatcatgagcgaagggaaagctgagacctatgaaggagtctatcagtgtacagcaaggaacgaacgcggagctgcagtttctaataacattgttgtccgcccatccagatcaccattgtggaccaaagaaaaacttgaaccaatcacacttcaaagtggtcagtctttagtacttccctgcagacccccaattggattaccaccacctataatattttggatggataattcctttcaaagacttccacaaagtgagagagtttctcaaggtttgaatggggacctttatttttccaatgtcctcccagaggacacccgcgaagactatatctgttatgctagatttaatcatactcaaaccatacagcagaagcaacctatttctgtgaaggtgatttcagctaaatcaagtagagagaggccaccaacatttttaactccagaaggcaatgcaagtaacaaagaggaattaagaggaaatgtgctttcactggagtgcattgcagaaggactgcctaccccaattatttactgggcaaaggaagatggaatgctacccaaaaacaggacagtttataagaactttgagaaaaccttgcagatcattcatgtttcagaagcagactctggaaattaccaatgtatagcaaaaaacgcattaggagccatccaccataccatttctgttagagttaaagcggctccatactggatcacagcccctcaaaatcttgtgctgtccccaggagaggatgggaccttgatctgcagagctaatggcaaccccaaacccagaattagctggttaacaaatggagtcccaatagaaattgcccctgatgaccccagcagaaaaatagatggcgataccattattttttcaaatgttcaagaaagatcaagtgcagtctatcagtgcaatgcctctaatgaatatggatatttactggcaaacgcatttgtaaatgtgctggctgagccaccacgaatcctcacacctgcaaacacactctaccaggtcattgcaaacaggcctgctttactagactgtgccttctttgggtctcctctcccaaccatcgagtggtttaaaggagctaaaggaagtgctcttcatgaagatatttatgttttacatgaaaatggaactttggaaattcctgtggcccaaaaggacagtacaggaacttatacgtgtgttgcaaggaataaattagggatggcgaagaatgaagttcacttagaaatcaaagatcctacatggatcgttaaacagcccgaatatgcagttgtgcaaagagggagcatggtgtcctttgaatgcaaagtgaaacatgatcacaccttatccctcactgtcctgtggctgaaggacaacagggaactgcccagtgatgaaaggttcactgttgacaaggatcatctagtggtagctgatgtcagtgacgatgacagcgggacctacacgtgtgtggccaacaccactctggacagcgtctccgccagcgctgtgcttagcgttgttgctcctactccaactccagctcccgtttacgatgtcccaaatcctccctttgacttagaactgacagatcaacttgacaaaagtgttcagctgtcatggaccccaggcgatgacaacaatagccccattacaaaattcatcatcgaatatgaagatgcaatgcacaagccagggctgtggcaccaccaaactgaagtttctggaacacagaccacagcccagctgaagctgtctccttacgtgaactactccttccgcgtgatggcagtgaacagcattgggaagagcttgcccagcgaggcgtctgagcagtatttgacgaaagcctcagaaccagataaaaaccccacagctgtggaaggactgggatcagagcctgataatttggtgattacgtggaagcccttgaatggtttcgaatctaatgggccaggccttcagtacaaagttagctggcgccagaaagatggtgatgatgaatggacatctgtggttgtggcaaatgtatccaaatatattgtctcaggcacgccaacctttgttccatacctgatcaaagttcaggccctgaatgacatggggtttgcccccgagccagctgtagtcatgggacattctggagaagacctcccaatggtggctcctgggaacgtgcgtgtgaatgtggtgaacagtaccttagccgaggtgcactgggacccagtacctctgaaaagcatccgaggacacctacaaggctatcggatttactattggaagacccagagttcatctaaaagaaacagacgtcacattgagaaaaagatcctcaccttccaaggcagcaagactcatggcatgttgccggggctagagccctttagccactacacactgaatgtccgagtggtcaatgggaaaggggagggcccagccagccctgacagagtctttaatactccagaaggagtccccagtgctccctcgtctttgaagattgtgaatccaacactggactctctcactttggaatgggatccaccgagccacccgaatggcattttgacagagtacaccttaaagtatcagccaattaacagcacacatgaattaggccctctggtagatttgaaaattcctgccaacaagacacggtggactttaaaaaatttaaatttcagcactcgatataagttttatttctatgcacaaacatcagcaggatcaggaagtcaaattacagaggaagcagtaacaactgtggatgaagcgatggcaagccggcaggtggatattgcaactcagggctggttcattggtctgatgtgtgctgttgctctccttatcttaattttgctgattgtttgcttcatcagaagaaacaagggtggtaaatatccagttaaagaaaaggaagatgcccatgctgaccctgaaatccagcctatgaaggaagatgatgggacatttggagaatacagtgatgcagaagaccacaagcctttgaaaaaaggaagtcgaactccttcagacaggactgtgaaaaaagaagatagtgacgacagcctagttgactatggagaaggggttaatggccagttcaatgaggatggctcctttattggacaatacagtggtaagaaagagaaagagccggctgaaggaaacgaaagctcagaggcaccttctcctgtcaacgccatgaattcctttgtttaatttttaagctctttgccaatattccatttctctagaatgtttatcctaagcacttgtttgtcagccctctcatactatgaacatatgggtagagagtatattttctgctgtatgttagtattatgagaatagttacagcaaaaacataactcagtcaaatgatatgttaatatgaactggaatgcaaagtgcatactttttcattcaaaatgggtattcttgatttcctcagaactgataaaaaataatgcaacatcaccaacagatcctgttatttcctctgcaggatacagttcaatatgatgcatgaaaaatgctccacatttaaaggacatacccgtgtatgttatgaaaacatggtttgatactttgtttatactaccctcagctgaacccctatatatgaattccgttttcattgtcaagaatgttactgtagtattctctagaacttcaatgtctttgtggacattgttgtgaaattggtgactatgtatagctgtcgttagtctttttgggagactgttaggaacagtttgtacagtatatacttgctaaatgagttcattatgacagtcacattgctgatgcttactgagaactattacctactcttggctcctgttactccgtaggcttcttaatcttccaggcattacagcagcacagtgttctactttttacatcatttctatgttcggttgtttttaggcataaacaatgtgtattgcagtgcatttcggcatttgtgccatactgaaagaatcaaaaacaaatcatccaaattaaatttcaaacattatttcagagaacacagggcaagacacatacagtgccttcagatattaagcattccacaacatcgtgcattctgtatcagctggtccagtccattctgggtcctagattactgtcattgtctaaaagtaacttttaaaaagcagagttcatgaaaactgcaatgctgggaaaagaaggaaacatgaaaataaaaataagacagtttattagaaatagcatttcctcataagcataaaaagaaaatctttgttgccaactgaagcacatgatgattttgtggtcctttatggtttctattacattcagtaagaaagatgtcaacatgctagaaaattaattttaaaactaagttattccaacactaaaagcatacaacagcatgccaacagtaatatattattctccaagactttacctatgtaagtgttcaaaactctgcagcattaaacaacgtgtatgcaaattgttatggatacatttcagaatctaagaaatcaggcaagtgcttaaaaggccaacggtccaagggattacatctgcagtttaaaaagtaaatatatattctatcgtattcataaacaatatctatcaaatgggttacctccaaatatgaaaatctataacaacctatggttgaaggaatgctcagtttcatttgccaataaattggtttctcataacttgcatcaagtttaattttaagtaaagctttttatatgtagatattttgttgaatttgtaaatacacttaaaatgtagatgctatatgcttataggtgttacatacaaataaacatgcaatgtttatgttgtactgtataagaggtaagctaattaatgcagtgaatgggattggaaagcatctacttaaatatctattgggttcccccctccccccaccttttttgctgtgaaactgaaatagtgaacttttctacgtattgacagcagatttttcgatgaaatcttcagagctttgcctatggggcacagtaggcctagtaacctggcatgtttgatatatgtaggtaaagcataatttaaagtaatcccaggtaaagatggccctaaatactttcatgtctctatattcatttttcacagatccacctgtctcttgaaaatataaaaagacaaaacaggtttgccttggcatcagagagcacaaagattaaaagttactttaaatttgccaatattttgggagaacaataaaactacattttttcctcttccatactggtagatgcgaaatttatctgtgcatgaaagggtcacttctgtaatagtgcaacagatttggtattaaaaattaaatgtggttttaaaagttcctctctcttttgtaatttatgttcccaattgagtgtgaatgtccaagtaatggtgtatgtaatggtacaggcaaatgtgactggatttccctcaaaaaagtaactattaaacagtcttgatctctttgtgacttttaa

SEQ ID NO: 7607 - DNA, 3606 bp, Homo sapiens
gcgtggtctgcgcgcgcccggccgtgcgtgcggatgcggggaggctgcgtgtgtgcgcagggagagaacgccggccaccttcccgcttccgagctgggtgcgcgccgagcacaggagggtgcaatacctgccttgcgtcgcccgtgccgctccagccaccgtcaaatccgggtagcgacccggggcgtttgcagcggtgccgaggaagaggacgggaacggtgttacgattgcctgcgtttaggaggtggctgcgttgtgggaaaagctatcaaggaagaaattgccaaaccatgtctttttttctgttttcagagtagttcacaacagatctgagtgttttaattaagcatggaatacagaaaacaacaaaaaacttaagctttaatttcatctggaattccacagagacaaggccactttatgtttcccaggctggactggaacccctgggctcaaatgatcctcctacctaagcctgcagagtagcgaggacttcagttttcttagctccctggacccggttgacctgttggctcttcccgctggctgctctatcacgtggtgctctccgactactcaccccgagtgtaaagtcttgctgctctgttgcccaggctggagtacagtggcaggatctcagctcactgcaatctccgtctctcaggtttaagcagttctcctgcctcagcctcccaagtaggtgggactacagaaccttcggctcgcgtgcttctgagctgctgtggatggcctcggctctctggactgtccttccgagtaggatgtcactgagatccctcaaatggagcctcctgctgctgtcactcctgagtttctttgtgatgtggtacctcagccttccccactacaatgtgatagaacgcgtgaactggatgtacttctatgagtatgagccgatttacagacaagactttcacttcacacttcgagagcattcaaactgctctcatcaaaatccatttctggtcattctggtgacctcccacccttcagatgtgaaagccaggcaggccattagagttacttggggtgaaaaaaagtcttggtggggatatgaggttcttacatttttcttattaggccaagaggctgaaaaggaagacaaaatgttggcattgtccttagaggatgaacaccttctttatggtgacataatccgacaagattttttagacacatataataacctgaccttgaaaaccattatggcattcaggtgggtaactgagttttgccccaatgccaagtacgtaatgaagacagacactgatgttttcatcaatactggcaatttagtgaagtatcttttaaacctaaaccactcagagaagtttttcacaggttatcctctaattgataattattcctatagaggattttaccaaaaaacccatatttcttaccaggagtatcctttcaaggtgttccctccatactgcagtgggttgggttatataatgtccagagatttggtgccaaggatctatgaaatgatgggtcacgtaaaacccatcaagtttgaagatgtttatgtcgggatctgtttgaatttattaaaagtgaacattcatattccagaagacacaaatcttttctttctatatagaatccatttggatgtctgtcaactgagacgtgtgattgcagcccatggcttttcttccaaggagatcatcactttttggcaggtcatgctaaggaacaccacatgccattattaacttcacattctacaaaaagcctagaaggacaggatactttgtggaaagtgttaaataaagtaggtactgtggaaaattcatggggaggtcagtgtgctggcttacactgaactgaaactcatgaaaaacccagactggagactggagggttacacttgtgatttattagtcaggcccttcaaagatgatatgtggaggaattaaatataaaggaattggaggtttttgctaaagaaattaataggaccaaacaatttggacatgtcattctgtagactagaatttcttaaaagggtgttactgagttataagctcactaggctgtaaaaacaaaacaatgtagagttttatttattgaacaatgtagtcacttgaaggttttgtgtatatcttatgtggattaccaatttaaaaatatatgtagttctgtgtcaaaaaacttcttcactgaagttatactgaacaaaattttacctgtttttggtcatttataaagtacttcaagatgttgcagtatttcacagttattattatttaaaattacttcaactttgtgtttttaaatgttttgacgatttcaatacaagataaaaaggatagtgaatcattctttacatgcaaacattttccagttacttaactgatcagtttattattgatacatcactccattaatgtaaagtcataggtcattattgcatatcagtaatctcttggactttgttaaatattttactgtggtaatatagagaagaattaaagcaagaaaatctgaagtattgtcttgtttttaaaaaatacagttcctagtgtttttagaagtcacttaatttgtctcatttttccacctggaaattaggaataatgtagaatgcaaggcagtaatttccttttggaaaggactctgaaggcagaaaagaagggagagaacctcatgggcagaatattataaaaagagtgtcatattccagcatttgaattggaaagagaagagtgaagatccaagttgcattattaatctgccctgtgttttttccttttaacaatcagtttgagctgctgctgttatgagtttctcatcaagatgaaagccctaatatgtaaagtcaaatccgatttaaattttgtgcttttatagaaagaaatttcttcatagacgtggtgatatatcatttgttggacctgctaatagtaggtcaaaggggagcactccttgccccctgttcctgggtttatgcagttttctttttagagtttatatagggcaagtggttctttttctctgaattacaggatggaaaaaggtcatatcctttgtcaggaaatataaacttgaaagtatgtagtcagctcttgtaatactcatatttatgattgtcctatatgaaaaacaacttcagttaaaactataatgtgtgattctgtataacaaggtgatgtctgtttcccagggctcagacctaatccagttataataaaatcaattaaatgaaatattctatagaatcgatctatgcccttgttaatctccatccatataggagtcacgttctttaagacagatggtggtagttatttttgtggcatggttagatttgactggttttgcagaagattacagttatgtactgcataatgacatatacaatagtggtcccataaaattataatggagcagaaaatctattgcctcatgatgttttagccgttttaatgtcatagcctagtgcattactcacgtgtctgtggagatgctggtgtaaacaaacctactacactgccagttgtataaaagtacagcacattcagttatgtacagtatgtaatactgataatgacaataaatgacaccggtttgtgta

SEQ ID NO: 7608 - DNA, 5561 bp, Homo sapiens
gtagatgtccacgcccacagaccctggtgcgatgccccacccagggccttcgccggggcctgggccttcccctgggccaattcttgggcctagtccaggaccaggaccatccccaggttccgtccacagcatgatggggccaagtcctggacctccaagtgtctcccatcctatgccgacgatggggtccacagacttcccacaggaaggcatgcatcaaatgcataagcccatcgatggtatacatgacaaggggattgtagaagacatccattgtggatccatgaagggcactggtatgcgaccacctcacccaggcatgggccctccccagagtccaatggatcaacacagccaaggttatatgtcaccacacccatctccattaggagccccagagcacgtctccagccctatgtctggaggaggcccaactccacctcagatgccaccaagccagccgggggccctcatcccaggtgatccgcaggccatgagccagcccaacagaggtccctcacctttcagtcctgtccagctgcatcagcttcgagctcagattttagcttataaaatgctggcccgaggccagcccctccccgaaacgctgcagcttgcagtccaggggaaaaggacgttgcctggcttgcagcaacaacagcagcagcaacagcagcagcagcagcagcagcagcagcagcagcagcagcaacagcagccgcagcagcagccgccgcaaccacagacgcagcaacaacagcagccggcccttgttaactacaacagaccatctggcccggggccggagctgagcggcccgagcaccccgcagaagctgccggtgcccgcgcccggcggccggccctcgcccgcgccccccgcagccgcgcagccgcccgcggccgcagtgcccgggccctcagtgccgcagccggccccggggcagccctcgcccgtcctccagctgcagcagaagcagagccgcatcagccccatccagaaaccgcaaggcctggaccccgtggaaattctgcaagagcgggaatacagacttcaggcccgcatagctcataggatacaagaactggaaaatctgcctggctctttgccaccagatttaagaaccaaagcaaccgtggaactaaaagcacttcggttactcaatttccagcgtcagctgagacaggaggtggtggcctgcatgcgcagggacacgaccctggagacggctctcaactccaaagcatacaaacggagcaagcgccagactctgagagaagctcgcatgaccgagaagctggagaagcagcagaagattgagcaggagaggaaacgccgtcagaaacaccaggaatacctgaacagtattttgcaacatgcaaaagattttaaggaatatcatcggtctgtggccggaaagatccagaagctctccaaagcagtggcaacttggcatgccaacactgaaagagagcagaagaaggagacagagcggattgaaaaggagagaatgcggcgactgatggctgaagatgaggagggttatagaaaactgattgatcaaaagaaagacaggcgtttagcttaccttttgcagcagaccgatgagtatgtagccaatctgaccaatctggtttgggagcacaagcaagcccaggcagccaaagagaagaagaagaggaggaggaggaagaagaaggctgaggagaatgcagagggtggggagtctgccctgggaccggatggagagcccatagatgagagcagccagatgagtgacctccctgtcaaagtgactcacacagaaaccggcaaggttctgttcggaccagaagcacccaaagcaagtcagctggacgcctggctggaaatgaatcctggttatgaagttgcccctagatctgacagtgaagagagtgattctgattatgaggaagaggatgaggaagaagagtccagtaggcaggaaaccgaagagaaaatactcctggatccaaatagcgaagaagtttctgagaaggatgctaagcagatcattgagacagctaagcaagacgtggatgatgaatacagcatgcagtacagtgccaggggctcccagtcctactacaccgtggctcatgccatctcggagagggtggagaaacagtctgccctcctaattaatgggaccctaaagcattaccagctccagggcctggaatggatggtttccctgtataataacaacttgaacggaatcttagccgatgaaatggggcttggaaagaccatacagaccattgcactcatcacttatctgatggagcacaaaagactcaatggcccctatctcatcattgttcccctttcgactctatctaactggacatatgaatttgacaaatgggctccttctgtggtgaagatttcttacaagggtactcctgccatgcgtcgctcccttgtcccccagctacggagtggcaaattcaatgtcctcttgactacttatgagtatattataaaagacaagcacattcttgcaaagattcggtggaaatacatgatagtggacgaaggccaccgaatgaagaatcaccactgcaagctgactcaggtcttgaacactcactatgtggcccccagaaggatcctcttgactgggaccccgctgcagaataagctccctgaactctgggccctcctcaacttcctcctcccaacaatttttaagagctgcagcacatttgaacaatggttcaatgctccatttgccatgactggtgaaagggtggacttaaatgaagaagaaactatattgatcatcaggcgtctacataaggtgttaagaccatttttactaaggagactgaagaaagaagttgaatcccagcttcccgaaaaagtggaatatgtgatcaagtgtgacatgtcagctctgcagaagattctgtatcgccatatgcaagccaaggggatccttctcacagatggttctgagaaagataagaaggggaaaggaggtgctaagacacttatgaacactattatgcagttgagaaaaatctgcaaccacccatatatgtttcagcacattgaggaatcctttgctgaacacctaggctattcaaatggggtcatcaatggggctgaactgtatcgggcctcagggaagtttgagctgcttgatcgtattctgccaaaattgagagcgactaatcaccgagtgctgcttttctgccagatgacatctctcatgaccatcatggaggattattttgcttttcggaacttcctttacctacgccttgatggcaccaccaagtctgaagatcgtgctgctttgctgaagaaattcaatgaacctggatcccagtatttcattttcttgctgagcacaagagctggtggcctgggcttaaatcttcaggcagctgatacagtggtcatctttgacagcgactggaatcctcatcaggatctgcaggcccaagaccgagctcaccgcatcgggcagcagaacgaggtccgggtactgaggctctgtaccgtgaacagcgtggaggaaaagatcctcgcggccgcaaaatacaagctgaacgtggatcagaaagtgatccaggcgggcatgtttgaccaaaagtcttcaagccacgagcggagggcattcctgcaggccatcttggagcatgaggaggaaaatgaggaagaagatgaagtaccggacgatgagactctgaaccaaatgattgctcgacgagaagaagaatttgacctttttatgcggatggacatggaccggcggagggaagatgcccggaacccgaaacggaagccccgtttaatggaggaggatgagctgccctcctggatcattaaggatgacgctgaagtagaaaggctcacctgtgaagaagaggaggagaaaatatttgggagggggtcccgccagcgccgtgacgtggactacagtgacgccctcacggagaagcagtggctaagggccatcgaagacggcaatttggaggaaatggaagaggaagtacggcttaagaagcgaaaaagacgaagaaatgtggataaagatcctgcaaaagaagatgtggaaaaagctaagaagagaagaggccgccctcccgctgagaaactgtcaccaaatccccccaaactgacaaagcagatgaacgctatcatcgatactgtgataaactacaaagatagttcagggcgacagctcagtgaagtcttcattcagttaccttcaaggaaagaattaccagaatactatgaattaattaggaagccagtggatttcaaaaaaataaaggaaaggattcgtaatcataagtaccggagcctaggcgacctggagaaggatgtcatgcttctctgtcacaacgctcagacgttcaacctggagggatcccagatctatgaagactccatcgtcttacagtcagtgtttaagagtgcccggcagaaaattgccaaagaggaagagagtgaggatgaaagcaatgaagaggaggaagaggaagatgaagaagagtcagagtccgaggcaaaatcagtcaaggtgaaaattaagctcaataaaaaagatgacaaaggccgggacaaagggaaaggcaagaaaaggccaaatcgaggaaaagccaaacctgtagtgagcgattttgacagcgatgaggagcaggatgaacgtgaacagtcagaaggaagtgggacggatgatgagtgatcagtatggacctttttccttggtagaactgaattccttcctcccctgtctcatttctacccagtgagttcatttgtcatataggcactgggttgtttctatatcatcatcgtctataaactagctttaggatagtgccagacaaacatatgatatcatggtgtaaaaaacacacacatacacaaatatttgtaacatattgtgaccaaatgggcctcaaagattcagattgaaacaaacaaaaagcttttgatggaaaatatgtgggtggatagtatatttctatgggtgggtctaatttggtaacggtttgattgtgcctggttttatcacctgttcagatgagaagatttttgtcttttgtagcactgataaccaggagaagccattaaaagccactggttattttatttttcatcaggcaattttcgaggtttttatttgttcggtattgtttttttacactgtggtacatataagcaactttaataggtgataaatgtacagtagttagatttcacctgcatatacatttttccattttatgctctatgatctgaacaaaagctttttgaattgtataagatttatgtctactgtaaacattgcttaatttttttgctcttgatttaaaaaaaagttttgttgaaagcgctattgaatattgcaatctatatagtgtattggatggcttcttttgtcaccctgatctcctatgttaccaatgtgtatcgtctccttctccctaaagtgtacttaatctttgctttctttgcacaatgtctttggttgcaagtcataagcctgaggcaaataaaattccagtaatttcgaagaa

SEQ ID NO: 7609 - DNA, 575 bp, Homo sapiens
agtccccagtgctccctcgtctttgaagattgtgaatccaacactggactctctcactttggaatgggatccaccgagccacccgaatggcattttgacagagtacaccttaaagtatcagccaattaacagcacacatgaattaggccctctggtagatttgaaaattcctgccaacaagacacggtggactttaaaaaatttaaatttcagcactcgatataagttttatttctatgcacaaacatcagcaggatcaggaagtcaaattacagaggaagcagtaacaactgtggatgaagcgatggcaagccggcaggtggatattgcaactcagggctggttcattggtctgatgtgtgctgttgctctccttatcttaattttgctgattgtttgcttcatcagaagaaacaagggtggtaaatatccagttaaagaaaaggaagatgcccatgctgaccctgaaatccagcctatgaaggaagatgatgggacatttggagaatacagacagtaggatctgcatccttactagcatatagaaaaatcagagaaacaatgcaaccaagagt

SEQ ID NO: 7610 - DNA, 2281 bp, Homo sapiens
ggggtaacgggggaaactggggaagtggggaaccgaggggcaaccaggggaagatggggtgctggaggagagcttgtgggagccaaggagcaccttggacatctggagtctggcaggagtgatgacgggtggaggggctagctcgaggcagggctggtggggcctgaggccagtgaggagtgtggagtaggcgcccaggcatcgtgcagacagggcgacatcagctggggacgatgggcctgagctagggctggaaagaagggggagccaggcattcatcccggtcacttttggttacaggacgtggcagctggttggacgaggggagctggtgggcagggtttgatcccagggcctgggcaacggaggtgtagctggcagcagcgggcaggtgaggaccccatctgccgggcaggtgagtcccttccctccccaggcctcgcttccccagccttctgaaagaaggaggtttaggggatcgagggctggcggggagaagcagacaccctcccagcagaggggcaggatgggggcaggagagttagcaaaggtgacatcttctcggggggagccgagactgcgcaaggctggggggttatgggcccgttccaggcagaaagagcaagagggcagggagggagcacaggggtggccagcgtagggtccagcacgtggggtggtaccccaggcctgggtcagacagggacatggcaggggacacaggacagaggggtccccagctgccacctcacccaccgcaattcatttagtagcaggcacaggggcagctccggcacggctttctcaggcctatgccggagcctcgagggctggagagcgggaagacaggcagtgctcggggagttgcagcaggacgtcaccaggagggcgaagcggccacgggaggggggccccgggacattgcgcagcaaggaggctgcaggggctcggcctgcgggcgccggtcccacgaggcactgcggcccagggtctggtgcggagagggcccacagtggacttggtgacgctgtatgccctcaccgctcagcccctggggctggcttggcagacagtacagcatccaggggagtcaagggcatggggcgagaccagactaggcgaggcgggcggggcggagtgaatgagctctcaggagggaggatggtgcaggcaggggtgaggagcgcagcgggcggcgagcgggaggcactggcctccagagcccgtggccaaggcgggcctcgcgggcggcgacggagccgggatcggtgcctcagcgttcgggctggagacgaggccaggtctccagctggggtggacgtgcccaccagctgccgaaggccaagacgccaggtccggtggacgtgacaagcaggacatgacatggtccggtgtgacggcgaggacagaggaggcgcgtccggccttcctgaacaccttaggctggtggggctgcggcaagaagcgggtctgtttctttacttcctccacggagtcggcacactatggctgccctctgggctcccagaacccacaacatgaaagaaatggtgctacccagctcaagcctgggcctttgaatccggacacaaaaccctctagcttggaaatgaatatgctgcactttacaaccactgcactacctgactcaggaatcggctctggaagctagaggaaccagacctcatcagcccaacatcaaagacaccatcggaacagcagcgcccgcagcacccaccccgcaccggcgactccatcttcatggccaccccctgcggcggacggttgaccaccagccaccacatcatcccagagctgagctcctccagcgggatgacgccgtccccaccacctccctcttcttctttttcatccttctgtctctttgtttctgagctttcctgtctttccttttttctgagagattcaaagcctccacgactctgtttcccccgtcccttctgaatttaatttgcactaagtcatttgcactggttggagttgtggagacggccttgagtctcagtacgagtgtgcgtgagtgtgagccaccttggcaagtgcctgtgcagggcccggccgccctccatctgggccgggtgactgggcgccggctgtgtgcccgaggcctcaccctgccctcgcctagtctggaagctccgaccgacatcacggagcagccttcaagcattccattacgccccatctcgctctgtgcccctccccaccagggcttcagcaggagccctggactcatcatcaataaacactgttacagcaa

SEQ ID NO: 7611 - DNA, 2272 bp, Homo sapiens
agtgcagcgcagccgcggggagcgaggagcgcgcggagccggccatgggcaagtcagaatctctacagagcctccagcggtagaggcctggcctccagaaggaacttcgagaacccagtgcagccccacctaggacacctataccctccaccccagcagagacagcccagccccttccctcagccctggggagccaggcccagggcttttagcagctctgacctttattttaagtcccaagtctggccccctggtaacctgcactctgcagtccctgatatccccctggggtccctcagccagaaattccatgggatttgacttggcccaggagacatgggagatctggctatgagaaaagggactaggactccctgttgcatcatctcctcagtctcgggtgaaaggcagcagagtagaagaaaggcaccagtgaagcttccaaacagtttcataatgaggtcctgaaggcccacaatgagtaccggcagaagcacggcgtccccccactgaagctctgcaagaacctcaaccgggaggctcaacagtattctgaggccctggccagcacgaggatcctcaagcacagcccggagtccagccgtggccagtgtggggagaaccttgcatgggcatcctatgatcagacaggaaaggaggtggctgatagatggtacagtgaaatcaagaactataacttccagcagcctggcttcacctcggggactggacacttcacggccatggtatggaagaacaccaagaagatgggcgtggggaaggcgtccgcaagtgacgggtcctcctttgtggtggccagatacttcccagcggggaatgttgtcaatgagggcttcttcgaagaaaacgtcctgccgccgaagaagtaacttgttaaatgtaatgggaaggtggcagacttaagaacgtggatatgaagtgcctagaaccaccacaacctggctgtgcgtctgtccctgtgggtgtatgtgcttgtgtgtgtgatgcatgtgagcgtctctggcacacacacttggacatacagttctgtgtgcgctcattcttattacaggagtgagcaaaggaagcatttaccccgatggttacctagaccacgattatttggattggggggaggggggatccgttttttttttttaattttttgttatttctaagcaaacctcttttgtacttttcttacttctaatatccatccctggactttttgtattccaaatgtttgtgatgctgagaagtgaagttcattttatgtgatcttcatgcgtcgtaatctacttttggtagataattaagattattaaaccctcatttaaatgtgacataaaatacagctttaagcacataaatacaaagcagcttccatcaggaacatggagcaggcagggactccattttacagaattactgagatttctcagttgtaaaacatgatgtcatcctgcatgcctcctggaattctccaatggggtcgccaaacaacaaatggagaaaaaaagttttacttccttgcattcttctacctttaaatagcaaagtaccactaccaccaccacctcttgcccccttccctcttttcttaaacttctggcatttcagagctcagcaggctacccctggtttctggagagttgggctaggcctgaagctccccctcccccacctctgctaggcagcccaggcctggtctgggagacagcccctcaccctgcctgggctcttggccaagcggccttggatggatgaagtcagagaggtggggtgagggtgagcttactcagggcccccagaggaagccctcagcctctgccctccccccacacagggcgggagcccaggcctgttcctggcagctgtggctgcagctgtgctcctgctccctcctggaatgtgcgacaagcccaaatgttccggggaggcggccggggcagggggcttagaagtgctaatatggttctgtgttttgcctgaaacgataccaggttcccctgaatagcaactttacaaggtccatgtgggagggaccaacccagatgccctgctgagtgtccctgaaaccatggcagctccatctgtcaagatggcaggggccggagtgagggggctgctggcttaacagcaggcatctgggcaggccagtcctcaaagcagctcctgaaggtctgtgttgcactgtcaccagtctcaagctatgcctctaatttcaccagggatattgactaagaagacaataaaatctttttctttgtgt

SEQ ID NO: 7612 - DNA, 2784 bp, Homo sapiens
tgaccctaccagttctcaagtcagatctcttctcataagggcactgtgtggagcttctgagatctgtggaggtttttctctgcaaatgcaggaagaaatcaggtggatggatgcataattatggccctgctcctggtctctttgctggcattcctgagcttgggctcaggatgtcatcatcggatctgtcactgctctaacagggtttttctctgccaagagagcaaggtgacagagattccttctgacctcccgaggaatgccattgaactgaggtttgtcctcaccaagcttcgagtcatccaaaaaggtgcattttcaggatttggggacctggagaaaatagagatctctcagaatgatgtcttggaggtgatagaggcagatgtgttctccaaccttcccaaattacatgaaattagaattgaaaaggccaacaacctgctctacatcaaccctgaggccttccagaaccttcccaaccttcaatatctgttaatatccaacacaggtattaagcaccttccagatgttcacaagattcattctctccaaaaagttttacttgacattcaagataacataaacatccacacaattgaaagaaattctttcgtggggctgagctttgaaagtgtgattctatggctgaataagaatgggattcaagaaatacacaactgtgcattcaatggaacccaactagatgagctgaatctaagcgataataataatttagaagaattgcctaatgatgttttccacggagcctctggaccagtcattctagatatttcaagaacaaggatccattccctgcctagctatggcttagaaaatcttaagaagctgagggccaggtcgacttacaacttaaaaaagctgcctactctggaaaagcttgtcgccctcatggaagccagcctcacctatcccagccattgctgtgcctttgcaaactggagacggcaaatctctgagcttcatccaatttgcaacaaatctattttaaggcaagaagttgattatatgactcaggctaggggtcagagatcctctctggcagaagacaatgagtccagctacagcagaggatttgacatgacgtacactgagtttgactatgacttatgcaatgaagtggttgacgtgacctgctcccctaagccagatgcattcaacccatgtgaagatatcatggggtacaacatcctcagagtcctgatatggtttatcagcatcctggccatcactgggaacatcatagtgctagtgatcctaactaccagccaatataaactcacagtccccaggttccttatgtgcaacctggcctttgctgatctctgcattggaatctacctgctgctcattgcatcagttgatatccataccaagagccaatatcacaactatgccattgactggcaaactggggcaggctgtgatgctgctggctttttcactgtctttgccagtgagctgtcagtctacactctgacagctatcaccttggaaagatggcataccatcacgcatgccatgcagctggactgcaaggtgcagctccgccatgctgccagtgtcatggtgatgggctggatttttgcttttgcagctgccctctttcccatctttggcatcagcagctacatgaaggtgagcatctgcctgcccatggatattgacagccctttgtcacagctgtatgtcatgtccctccttgtgctcaatgtcctggcctttgtggtcatctgtggctgctatatccacatctacctcacagtgcggaaccccaacatcgtgtcctcctctagtgacaccaggatcgccaagcgcatggccatgctcatcttcactgacttcctctgcatggcacccatttctttctttgccatttctgcctccctcaaggtgcccctcatcactgtgtccaaagcaaagattctgctggttctgtttcaccccatcaactcctgtgccaaccccttcctctatgccatctttaccaaaaactttcgcagagatttcttcattctgctgagcaagtgtggctgctatgaaatgcaagcccaaatttataggacagaaacttcatccactgtccacaacacccatccaaggaatggccactgctcttcagctcccagagtcaccagtggttccacttacatacttgtccctctaagtcatttagcccaaaactaaaacacaatgtgaaaatgtatctgagtattgaatgataattcagtcttgcctttgaagggtatgtcacaaagagctgacagtgcttctacacatttcatctaatttaatattcctggcatacctttaaggtaaattggtcaggaactattaattccatgtgatacattaggaagctgaattattagtaacaacaataataattaaagaatgcaatactgtattacatattttatccttatatatgttatttttgcacgttatgttcaaagtgcttttgttcagatatctcaagtgatccctgttaaataagcaggacagggattattcttggagttttacaaatgaggaaaccacgactcaaagagttaagtgacttgttcaaaattgtttagtttgtaagaggcagagccaggattaggtattccgactcccagagaatttcccagagaagcaccatggtattcattcattcattcattcaacaaatattaattgaacacccatctgaagcctttgtaatgcgtcagtgtggataggctgaaatacatttcccagatttcccttcctcatgtgttt

SEQ ID NO: 7613 - DNA, 2381 bp, Homo sapiens
ctgggtttgttgtgaagttgcggtgatccagcgcagagccccgtcctgattgatcgcatcgcggggctcagatgactgtaaaatgaatagatgaaattcttgcttctcgaagattttcttgggcatctcccggaaagtgcgttttaaggcgaagtcatgatgtattctcccatctgtctcactcaggatgaatttcacccattcatcgaggcacttcttccacatgtccgtgcaattgcctatacttggttcaacctgcaggctcgaaaacgcaagtactttaaaaagcatgagaagcgaatgtcaaaggatgaagaaagagcagtcaaagatgagcttctcagtgaaaagcctgaaatcaaacagaagtgggcatccaggctccttgccaaactgcgcaaagatattcgccaggagtatcgagaggactttgtgctcaccgtgactggcaagaagcacccgtgctgtgtcttatccaatcccgaccagaagggtaagattaggagaatcgactgcctgcgacaggcagacaaagtctggcgtctggatctagtcatggtgatcctgttcaaaggcatccccttggaaagtaccgatggagagcggctcatgaaatccccacattgcacaaacccagcactttgtgtccagccacatcatatcacagtatcagttaaggagcttgatttgtttttggcatactacgtgcaggagcaagattctggacaatcaggaagtccaagccacaatgatcctgccaagaatcctccaggttaccttgaggatagttttgtaaaatctggagtcttcaatgtatcagaacttgtaagagtatccagaacgcccataacccagggaactggagtcaacttcccaattggagaaatcccaagccaaccatactatcatgacatgaactcgggggtcaatcttcagaggtctctgtcttctccaccaagcagcaaaagacccaaaactatatccatagatgaaaatatggaaccaagtcctacaggagacttttacccctctccaagttcaccagctgctggaagtcgaacatggcacgaaagagatcaagatatgtcttctccgactactatgaagaagcctgaaaagccattgttcagctctgcatctccacaggattcttccccaagactgagcactttcccccagcaccaccatcccggaatacctggagttgcacacagtgtcatctcaactcgaactccacctccaccttcaccgttgccatttccaacacaagctatccttcctccagccccatcgagctacttttctcatccaacaatcagatatcctccccacctgaatcctcaggatactctgaagaactatgtaccttcttatgacccatccagtccacaaaccagccagcctaacggcagtggtcaagtagtagggaaagtgcctggccatttcactcctgtcttggcaccctctccccatcccagtgcagtgcgacctgtgaccctgagcatgacagatactaaacccatcactacatccactgaagcctacacagcctcaggcacatctcaagccaatcgatatgtgggactaagcccaagagacccatccttcctacatcagcaacagtcctggtacctgggctagcttggttcctttccaagtgtcaaataggacacccatcttaccggccaatgtccaaaattacggtttgaacataattggagaacctttccttcaagcagaaacaagcaactgagggaaaaagaaacacaacaatagtttaagaaattttttttttaaataaaaaaaaaggaaaagaggaagactggacaaaacaacacaaaggcagaaaggaaagaaactgaagaaagaagataatagaccagcaattgcagcacttacaatcactaattcccttaaggttgaaactgtaatgacataaaaagggtcgatgatatttcactgatggtagatcgcagcccctgcaacgtagcctttgttacatgaagtccgctgggaaatagatgttctgtctctatgacaatatattttaactgactttctagatgccttaatatttgcatgataagctagttttattggtttagtattcttgttgtttacgcatggaatcactattcctggttatctcaccaacgaaggctaggaggcggcgtcagaggtgctgggtgacagagccatgagccagccattttataagcactctgatttctaaaagttaaaaaaaatatatgaaatctctgtagcctttagttatcagtacagatttattaaatttcggcccttaacccagccttttccagtgtgtaacccagtttgaaatcttaaaaaaagaaaaaatgaaaaaaaaaggaaaaaaagaa

SEQ ID NO: 7614 - DNA, 721 bp, Homo sapiens
cggtgcgaggcgggcttggcggggctgggcgcgtcccccggggcctcgcgatcgctggctgcgcggcgctcagccgcagtggccggccgagcaggtgcggcgtcggcagccgcctacattgagatcggggcaaccggcactttccacctggatgtttgaggttgtgtagatgtggccggcacccttgagagtggagctagggggtgcagactgagcagtgaacagaaggagccttggacagggctgggccagcctcccgagttccaggagcgaattgcaaacccaccgggaaaatgagcgaagagacggtccccgaggctgcctcgccgccgcccccgcaggggcagccttactttgaccgcttctcagaggacgaccccgagtacatgcgccttcgcaaccgggcggcggacctgcggcaggacttcaacctgatggagcagaagaagcgcgtcaccatgatcctgcagagtccctctttcagggaggagctggaaggcctcatccaggagcagatgaagaaggggaacaactcctccaacatctgggccctgcgacagatcgcggacttcatggccagcacctcccacgcagtcttcccgacatcttccatgaatgtctccatgatgacgcctatcaatgacctccacacagctgactccctgaacctggccaaaggggagcggctcatgcggtgcaagatcagcagtgtctaccgact

SEQ ID NO: 7615 - DNA, 564 bp, Homo sapiens
gtcccctcctccgcgccggccccaaccctgtcgctgccgccgcgctccgagtccccattcccgagctgccgctgttgtcgctcgctcagcgtctccctctcggccgccctctcctcgggacgatggcgcgcggtggccgcggccgccgcctggggttagccctggggctgctgctggcgctggtgctggcgccgcgggttctgcgggccaagcccacggtgcgcaaagagcgcgtggtgcggcccgactcggagctgggcgagcggccccctgaggacaaccagagcttccagtacgaccacgaggccttcctgggcaaggaggactccaagaccttcgaccagctcaccccggacgagagcaaggagaggctagggaagattgttgatcgaatcgacaatgatggggatggctttgtcactactgaggagctgaaaacctggatcaaacgggtgcagaaaagatacatctttgataatgtcgccaaagtctggaaggattatgatagggacatcgacaagaacggggatgggtttgtggatcaggatgagtatattgcggata

SEQ ID NO: 7616 - DNA, 7936 bp, Homo sapiens
atgcgcgcccgcggcgctccatcccaaacacacacacatttttcccccggacttggaaagtcacccaaagccgccccaagtgcaggcaaacagaccttgctgactgaaggcaaagactcctccatcccacctgccctcccagctgccacggccatcgacccctcctttacaaggggctcctgcaactccccagcagcacgtgttggaatggacttcggaccctggcctcttgggatgcaaaggatgaagtgacacccccagctacatccgaggaggttctaggacctgctacgagagtttgggaccaaggagaagagaatggatcttggaacagctgagggcacccggtgcacggacccgcctgcaggcaagcccgccatggcgcccaaacgcaagggtggcctgaagctgaacgccatctgcgccaagctgagccgccaggtggtggtggagaagcgagctgacgccggctcccacacggagggcagcccatcgcagccccgggaccaagagcgcagtggccctgagtctggggcagcccgggccccccgcagcgaggaagacaagagacgggcagtgatcgagaagtgggtgaacggggagtacagcgaggagccggcacccacacccgtgttggggcggattgcccgcgagggcctggagctgcctcccgagggtgtctacatggtgcagccccaggggtgcagcgatgaggaagaccacgcggaggagccctccaaggacggcggtgccctggaggagaaggattcggacggggcagcctccaaggaggacagcggccccagcaccaggcaggcttcaggagaggcctcctcgctgcgggactacgcggcctccaccatgaccgagttcctcggcatgtttggctatgatgaccagaacacgcgggacgagctggccaggaagatcagctttgagaagctgcacgcgggctccaccccggaggcagccacctcctccatgctgcccacctccgaggataccctcagcaagcgggcgcggttctctaagtatgaggagtacatccgcaagctcaaggctggcgagcagctctcctggccggcccccagcaccaagaccgaggagcgggtgggcaaggaggtggtgggcaccctgcccggcctgcggctgcccagcagcacggcccacctggagaccaaggccaccatcctgcccctgccgtcgcacagcagtgtccagatgcagaacctggtagcccgggcctccaagtacgacttcttcatccaaaaactgaagaccggcgagaatctgcggccccagaacgggagcacctacaagaagccatccaagtacgacctggagaatgtcaagtacctgcacctcttcaaacccggggagggcagccccgacatgggcggggccatcgccttcaagacaggcaaggtggggcgcccttccaagtacgacgtccggggcatccagaagccaggccccgccaaggttccgcccacccccagcctggctcccgcacccctcgccagcgtgcccagtgcccccagcgcccccgggccagggccagagcctcctgcctccctgtccttcaacactcccgagtacctgaagtcaaccttctccaaaacagactccatcaccacggggaccgtctccactgtcaagaacggactgcccacagataaaccagccgtcactgaagatgtaaacatttaccagaaatatattgccaggttctcgggcagccagcactgtggccacatccactgtgcctaccagtaccgcgagcactaccactgccttgaccctgagtgtaactaccagaggttcacgagtaagcaggacgtgatccgccactacaacatgcacaagaagcgcgacaactccctgcagcacggcttcatgcgtttcagcccgctggacgactgcagcgtctactaccacggctgccacctcaatgggaagagcacccactatcactgcatgcaggtgggctgtaacaaggtgtacacgagcacgtctgacgtgatgacccacgagaacttccacaagaagaatacccagctcattaacgacggcttccagcgcttccgagccaccgaagactgtggcacagccgactgccagttctacggacagaagaccacgcacttccactgcaggcgccccggctgcacattcactttcaagaacaagtgtgacatcgagaagcacaagagctaccacatcaaggacgatgcctacgccaaggacggcttcaagaagttctacaagtacgaggagtgcaagtacgagggctgcgtgtacagcaaggctaccaaccacttccactgcatccgcgccggctgcggcttcaccttcacctccaccagccagatgacctctcacaagcgcaagcatgagcgccggcacatccgctcctcgggcgcgctggggctgccgccctcgctgctgggcgccaaggacacggagcacgaggagtccagcaacgacgaccttgttgacttctccgccctgagcagcaagaactccagcctgagcgcctcccctaccagccagcagtcctctgcgtccctggctgccgccactgccgccaccgaggctgggcccagtgccaccaaacctcccaacagcaagatctcggggctgctgccccagggcctgcctggctcaatccccctggccctggccctctccaactcgggcctgcccacccccacgccctacttccccatactggctggccgtgggagcacctccctgcctgtgggcacccccagcctcctgggtgccgtgtcgtctgggtcagcagcctcagccacccctgacacacccacgctggtcgcctcgggagctggagactcagcccccgtggctgccgcctctgtcccggcaccacccgcctccatcatggagaggatctctgcaagcaagggcctcatctcgcccatgatggccaggctggctgcagctgccctcaagccctctgccacctttgacccaggaagcgggcagcaggtcaccccagccaggttccccccggcccaagtgaagccggaacccggtgagagcaccggcgccccaggcccccacgaagcctcccaggaccgcagtctagacctgactgtgaaggagcccagcaacgaatcaaatggccacgcagtcccggcaaattcatctcttttatcctcgcttatgaataagatgtctcagggcaaccctggcctgggcagcctgctgaacatcaaggcggaagcggaggggagccccgctgcggagccctcgcccttcctaggcaaggccgtgaaggcgctggttcaggagaagttggcagagccctggaaggtgtacctgcgcaggtttggtacaaaggacttctgtgacggccagtgtgacttcctccacaaggcccacttccactgcgtggtggaggaatgcggcgcgctcttcagcaccttggacggggccatcaagcacgcaaacttccacttccggacagagggaggagcagcaaaaggaaacacagaggctgcctttccggcctcggccgccgagaccaaacctcccatggccccctcgtcccctccggtccctcctgtcaccacggccacggtgtcctctctggaggggcccgctcccagcccggcctccgtgccctccacccccaccctgctcgcctggaagcagctggcttccaccataccccagatgcctcagatcccagcgtcagtgcctcacctgcccgcctcgcccttggcaacgacttctctagagaacgccaagccccaggtcaaacccggattcctccagttccaggagaacgatccttgcctcgccacggactgcaagtacgccaacaagttccacttccactgtctctttgggaactgcaagtacgtctgcaaaacgtctggcaaggccgaatcccactgcctggaccacatcaaccccaacaacaacctggtgaacgtgcgagaccagtttgcatactactctctgcagtgtctctgtcccaaccagcactgcgagttccgaatgcgtgggcactaccactgcctccgcaccggctgctattttgtgaccaacatcaccaccaagctcccctggcacatcaagaagcatgagaaggcggagcggcgggcagccaatggcttcaaatacttcaccaagcgcgaggagtgtggcaggctaggttgcaagtacaaccaggtgaacagccacttccactgcatccgggagggctgccagttctccttcctcctcaagcaccagatgacctcccacgcgcggaagcacatgcggaggatgctggggaagaacttcgaccgcgtgcccccctcccagggccccccaggcctgatggatgctgagacagatgagtgcatggactacactggctgcagcccaggcgccatgtcctctgagtcatccaccatggaccggagctgctccagcacccccgtgggtaacgagagcaccgcggcagggaacaccatctctatgccgacagcctcgggggccaaaaagcgcttctggatcatcgaggacatgtcgcccttcggcaagcggcggaagacggcgtcctcccggaagatgctggacgagggcatgatgctggagggcttccggcgcttcgacctttacgaggactgcaaggacgcagcttgtcagttctcgctcaaggtcacccactaccactgcacgcgcgagaactgcggctacaagttctgcgggcgcacgcacatgtacaagcacgcgcagcaccacgaccgcgtggacaacctggtgctggacgacttcaagcgcttcaaggcctcactcagctgccacttcgccgactgccccttctcgggcaccagcacgcacttccactgcctgcgctgccgcttccgctgcaccgacagcaccaaggtcacggcgcatcgcaagcaccacggcaaacaggacgtgatcagcgccgcgggcttctgccagttcagctccagcgccgactgcgccgtgcccgactgcaagtacaagctcaagtgctcgcacttccactgcaccttcccgggctgccgccacacggtggtgggcatgtcgcagatggactcgcacaagcgcaagcacgagaagcaggagcgcggcgagcccgcggcagagggccccgcgcccgggcctcccatcagtctggacggctccctgtcgctgggcgccgagccgggctcgctgctcttcctgcagtcggcggccgccggcctgggcctggcgctgggcgacgcgggcgaccccggcccgcccgacgccgccgcccccgggccgcgcgagggcgccgccgccgccgccgccgcagctggggagtcctcgcaggaggacgaggaggaggagctggagctgccggaggaggaggccgaagacgacgaggacgaggacgacgacgaggacgacgacgacgaggacgacgacgaggacgacgacgacgaggacctgcgcaccgactcggaggagtcgctgcccgaggcggcggcggaggcggcgggcgcgggcgcgcggaccccggccttggcggcgctggcggccctgggcgcccccggccccgcgcccactgcagcctcctcgccctagcggcgcccgcgggtggccctggcggcggcctcggcctcggcctcgggagcggcgccgccccgcgcgaagcggcccctgggcagagccccgcgccccgccggtgcttccggaccccgagtccgtctcaggacagaggcggggacccctctggtgctccgcggccgaggacacaggcggcggcggtggccctgctctagggaggccgggtctcttcagggaaacagaaggtgctcttgtcccggggtagggaacctaggagcaggggtcccgggcgaatgcggcgcagctcccggccgctgccccggcgcccctccccgcggccgattcggccccgcgaccattgctcaggactgggacgggcgctgggggccaccgggacccccaccgcgcgccaccagggcggggtggctcctggagccgctggcggggcctccctcatgcagctaggatcctcccccctgcccagggggagacgggcagaaggcagtcagcacgggtgacactacagggaccgtggaggaagcctcacgggagtagcagccgcggagctccagctcagccccaccccagggcccggctgctcccccaggcctgggtcgggtctgtttggcgactccctggccccagcctccgccccagggaaaccgaggctgcgtccaaaacccagagtagcccgctgggggccggggcggggtctcggccaccctggtggtgcaaacaggaaggatgcgcctggttttggctttaatgttcaaaatggaaaaaaatacaagaaagttgtacagtatttttcctgtaaaggttattattctacatagaacaaaaaggaagaaagcaggcgtggtgagagtgcagacccgcctgggcccggcctgaggttggaggctcagtcccgtttatcctgtgggatttggtccagggtttttgtagaggccttaactgtttgaggctgtctgtcttcacaatagcactgatgggagctgcgtgattccaactcttaacttgaattttgtagagacaagaaaaaaggactattactgttgatccaagtttgtagttaatttaacatttgagttctctcttggtgatgcgtgtggctttatagggcttttttttttttccagtttgttttattactttgtttgggatgcttcttcgctggtgcagtctacccagattgggttccctttgcaaaacatcccccttcctggagatgatgatgccatcgaagcccgggccagggcctgacctggcaggcacacacctggccagtggctctgaggtccccggggaccgagtcccctgcgagggcaggctgcccgaggccacacctgcccaccttccctactccaggccaccagctggtgtcagattgggccaccgggagagaacaggcctaggagggaatggaaggctggcggggaggctgtcatccagaagcctcctccccagaggtctccaggaggaacctggctcaactggggggcagtggtttacttttcccttttttcttcctttcttttgtcctctcagctgcccacagccagaaagccaggaccacccgaactggacagggagcagggagggaggagtggtcgcacggagcgtacctgattcaacaggaaatcagttattttctaaaacagcccctaccagagcctcctgaactctgtgggcaccacgtgctgctgtgagcatctgcccagacagtgacccgccacaggccccgggcgtctgtggaaggagttttgtaaaggaaaaaaaaacacacacacacaaacattttttcaatgtagcaaaatcaaacttaaaaaaaaaaaagaagaaaagaagaagatgccgacagtgcggagtctagccttttgtaaacttcatattgcacactaggactataagccattgctagctcattttgaattttaacgtgtaatttttgttttattttctttctgtggggaaacaatgcttgatccaccaatgctctttttaatgttttataactatgtatgtgtatatatataaatatcaaataatatgtatgcacatatgtgtgtgtatatatctatatgtatatacatatatagatatatagagatatatagagaggttttgagacaaaaaaaatacagaacgtgaaacccgagctgaacagcgtgtgctctgattacttgaatctggtctcctcggcacctggttattaagaactgaatatttttccacttgaatttagtgctattagaaatttaatatatgtgttttatttatttgatttttttttttttttttgcatgactgatgcaaggtttgacattttcactcaataaaaactggaaaaaaa

SEQ ID NO: 7617 - DNA, 582 bp, Homo sapiens
aattcgctttgaatcactaaatagaagagggaagcatttttcttccttcccaaaatgggagctgatgagagaggaaacatcgagggcgaagtgaaccaacaattttaaaagaccatctcctacctgctctcaaattttaggccttcagaacctcattttacccttgatggtaatagcttctacaagatcatcagcaatgaagaaggttacagacacatttgctatttccaaatagataaaaaagactgcacatttattacaaaaggcacctgggaagtcatcgggatagaagctctaaccagtgattatctatactacattagtaatgaatataaaggaatgccaggaggaaggaatctttataaaatccaacttagtgactatacaaaagtgacatgcctcagttgtgagctgaatccggaaaggtgtcagtactattctgtgtcattcagtaaagaggcgaagtattatcagctgagatgttccggtcctggtctgcccctctatactctacacagcagcgtgaatgataaagggctgagagtcctggaagacaattcagctttggataaaatgctgcag

SEQ ID NO: 7618 - DNA, 3174 bp, Homo sapiens
aagcagggtctcactctgtcacccaggctggagtgcagtggcgcagttatagctcactgcagcctcgacctcctgggctcaagtgatccttccacctcagcctccctagtagctgggaccacaggtggtgacttccaagagtgactccgtcggaggaaaatgactccccagtcgctgctgcagacgacactgttcctgctgagtctgctcttcctggtccaaggtgcccacggcaggggccacagggaagactttcgcttctgcagccagcagttgcagagcctggagtcgaaactgacctctgtgagattcatgggggacatggtgtccttcgaggaggaccggatcaacgccacggtgtggaagctccagcccacagccggcctccaggacctgcacatccactcccggcaggaggaggagcagagcgagatcatggagtactcggtgctgctgcctcgaacactcttccagaggacgaaaggccggagcggggaggctgagaagagactcctcctggtggacttcagcagccaagccctgttccaggacaagaattccagccaagtcctgggtgagaaggtcttggggattgtggtacagaacaccaaagtagccaacctcacggagcccgtggtgctcactttccagcaccagctacagccgaagaatgtgactctgcaatgtgtgttctgggttgaagaccccacattgagcagcccggggcattggagcagtgctgggtgtgagaccgtcaggagagaaacccaaacatcctgcttctgcaaccacttgacctactttgcagtgctgatggtctcctcggtggaggtggacgccgtgcacaagcactacctgagcctcctctcctacgtgggctgtgtcgtctctgccctggcctgccttgtcaccattgccgcctacctctgctccagggtgcccctgccgtgcaggaggaaacctcgggactacaccatcaaggtgcacatgaacctgctgctggccgtcttcctgctggacacgagcttcctgctcagcgagccggtggccctgacaggctctgaggctggctgccgagccagtgccatcttcctgcacttctccctgctcacctgcctttcctggatgggcctcgaggggtacaacctctaccgactcgtggtggaggtctttggcacctatgtccctggctacctactcaagctgagcgccatgggctggggcttccccatctttctggtgacgctggtggccctggtggatgtggacaactatggccccatcatcttggctgtgcataggactccagagggcgtcatctacccttccatgtgctggatccgggactccctggtcagctacatcaccaacctgggcctcttcagcctggtgtttctgttcaacatggccatgctagccaccatggtggtgcagatcctgcggctgcgcccccacacccaaaagtggtcacatgtgctgacactgctgggcctcagcctggtccttggcctgccctgggccttgatcttcttctcctttgcttctggcaccttccagcttgtcgtcctctaccttttcagcatcatcacctccttccaaggcttcctcatcttcatctggtactggtccatgcggctgcaggcccggggtggcccctcccctctgaagagcaactcagacagcgccaggctccccatcagctcgggcagcacctcgtccagccgcatctaggcctccagcccacctgcccatgtgatgaagcagagattcggcctcgtcgcacactgcctgtggcccccgagcccggcccagccccaggccagtcagccgcagactttggaaagcccaacgaccatggagagatgggccgttgccatggtggacggactcccgggctgggcttttgaattggccttggggactactcggctctcactcagctcccacgggactcagaagtgcgccgccatgctgcctagggtactgtccccacatctgtcccaacccagctggaggcctggtctctccttacaacccctgggcccagccctcattgctgggggccaggccttggatcttgagggtctggcacatccttaatcctgtgcccctgcctgggacagaaatgtggctccagttgctctgtctctcgtggtcaccctgagggcactctgcatcctctgtcattttaacctcaggtggcacccagggcgaatggggcccagggcagaccttcagggccagagccctggcggaggagaggccctttgccaggagcacagcagcagctcgcctacctctgagcccaggccccctccctccctcagccccccagtcctccctccatcttccctggggttctcctcctctcccagggcctccttgctccttcgttcacagctgggggtccccgattccaatgctgttttttggggagtggtttccaggagctgcctggtgtctgctgtaaatgtttgtctactgcacaagcctcggcctgcccctgagccaggctcggtaccgatgcgtgggctgggctaggtccctctgtccatctgggcctttgtatgagctgcattgcccttgctcaccctgaccaagcacacgcctcagaggggccctcagcctctcctgaagccctcttgtggcaagaactgtggaccatgccagtcccgtctggtttccatcccaccactccaaggactgagactgacctcctctggtgacactggcctagggcctgacactctcctaagaggttctctccaagcccccaaatagctccaggcgccctcggccgcccatcatggttaattctgtccaacaaacacacacgggtagattgctggcctgttgtaggtggtagggacacagatgaccgacctggtcactcctcctgccaacattcagtctggtatgtgaggcgtgcgtgaagcaagaactcctggagctacagggacagggagccatcattcctgcctgggaatcctggaagacttcctgcaggagtcagcgttcaatcttgaccttgaagatgggaaggatgttctttttacgtaccaattcttttgtcttttgatattaaaaagaagtacatgttcattgtagagaatttggaaactgtagaagagaatcaagaagaaaaataaaaatcagctgttgtaatcacctagc

SEQ ID NO: 7619 - DNA, 284 bp, Homo sapiens
gacaatgatgccgctgcccacattttggtccattcttttttttattatgcttctcttgcttggactggatagccagggatgtttcatcttctcgctcgtcaagtacgtacccctgacctacaacaaaacatacgtgtaccccaactgggccattgggctgggctggagcctggccctttcctccatgctctgcgttcccttggtcatcgtcatccgcctctgccagactgaggggccgttccttgtgagagtcaagtacctgctgaccccaagggaacccaacc

SEQ ID NO: 7620 - DNA, 2648 bp, Homo sapiens
gaaggaaagggtccgcctagccctgagtcaagcggtcttactgtaccgccgtgtgcattccctcatacggtcaggagttatgactcattttgaagatatcgagcctgcgtgctgccgaagcagggcgccgagtccatgcgaactgccatctgatccgctcttatcaatgaagcagccgatcatggcggatggcccccggtgcaagaggcgcaaacaagccaatcccaggaggaaaaacgccttggagtcagaaatgagcactcggagcgggagatgccctgctgctgcttgccaccggtgcggcccgtttgtaacttgcaaagtttgttgcttttgcccctgattcgggcagcgggtcctgggatgctcctgcttccctcctgcctcccacggagcccgggaagagggtctgcctccccatcccgccaccttccagcatcagcctctgaaaaatctcacagagacatgcacgttgtagcaaaaatcaaatccggaaactgcttgtttcagagaaagaaatgaagttgtcttttaaagaaaaactgaattaggaggagagaaaagggaaataggagaagaaaggaaaagttaaatttgatttttctccagagtttccactaaagggttggggacagtgtgaaggagaaggggagctttttacaaatgcctttggtctctgaacttcagtggcaaagaacagggatcaagttgaatgttctcagggctttggatcctagaggagaaacaatcagaagagcagaaatggttatccctgtttaaaataagccctcactctttaccacttccttaaaggagtggaggtgctggtagtgatggttagaggcaatgagggacggagaagttgctcccgtttcagagatgcttaaatgaaaaggaaagaaaatgcagtcaaccccttctccaggaggtgcctcctagctctcctccctgagaggtgaagttgggatggggcaacgagagtcatacacacttagacaaggaagtttccttcggatcactgtcagtccagacttggttatctttgcaaagtgtggaaatctttggcaagtagctttcttcgtaaagttgatgagcttctagggagcctgttttgctgactttcaaagcactggggcaggttgtgtggcaggtaccagttctgagggcgctccaaagatatccatctccatccttttttctctgtggagatcttctgcaagttttgtcacgctgcacacacacaaggctgggggctatgtatctaggctgatctatttgttttattttggtctggaaaaactaagccaattggggtagaaacatgctttccttcgtagcagagccagtaggctgctggtgtccatagagtgacagtccaccaggactaagggtgggctgaggattttaaactttacattgtttctctgttaccagatacaaataaattcacgtcttccaccatttgttttcaaatagggtaaaaccaagattaaagttccctgctcaactgctatgtcataggtttcagtgtttcccttccttcttaatttgcttaaagaaaattccaagaggttattaaagaccttgatgccatattaagaatatttcctgggaaaaatgtatgtctaccctgaaggtaggaaaggagggcgttgctagcctctagcagtgccgcgtttattctaagatgtgggagattcttttccttgcaacagtttttgtcatctgcattcttccaaggcttttaaggtgcattttcttctgtgtgaaaggaaattctttgtccttttcctctcagcaccgtggcttcccaaggtagacactattttgtgcctgtcacagagagagggagtgcaggtttgcaatgctcacagacaattgattgtctgccctaatgtgtttcatttacatgtttataacgtcaatggtgctggggtgtccactgtaccattcattcccgcattcccacaagggggcaattgtctgaatggccaagtcagacacctttttgattgctctttggttgtcttttcagagcaaagagataaaggaggaaaatctgtgatgcagaaacactagttgaaaatatacagaattaaatgtcaccacaaaagcagatgttaacataagcccaaatatgctttttagccaagatgtgaaggttgaaaaaaataattcagagcagagggaaggatgatttaaaccaataaatatagccctattccccctctttacttcttttctgtctttagcaatcagaagatgaaatgtaattttccttttcatttttaagccttgaaacatccaggcacctcctcattatttgtatgtttgctgtgatttgtgaattttgtatatatttacatagctctgtttatgccaacagcatcagcttaccacttggaaaatctattgaatgactatttgggctgtggggagggtaaacttttaaaaagtaagatccaagtatttcttcatcaagcagtttttaaaaggaaaacgataataatcagtaggctccatggaagcctttgccttaatagctatgtgccaaatacttttatcttgtgtgacagtcatgtcagagtgaaatctctcaggaaaagtgtaactagtagttacaaagtaaataaaggatttcattttaa

SEQ ID NO: 7621 - DNA, 4841 bp, Homo sapiens
gtgtgtggcttcatacatttggggaccctatttccactccctcctcttggcatgagactgtatacaggatccacccgaggacaatgattgcggagcccgctcacttttacctgtttggattaatatgtctctgttcaggctcccgtcttcgtcaggaagattttccacctcgcattgttgaacacccttcagacctgattgtctcaaaaggagaacctgcaactttgaactgcaaagctgaaggccgccccacacccactattgaatggtacaaagggggagagagagtggagacagacaaagatgaccctcgctcacaccgaatgttgctgccgagtggatctttatttttcttacgtatagtacatggacggaaaagtagacctgatgaaggagtctatgtctgtgtagcaaggaattaccttggagaggctgtgagccacaatgcatcgctggaagtagccatacttcgggatgacttcagacaaaacccttcggatgtcatggttgcagtaggagagcctgcagtaatggaatgccaacctccacgaggccatcctgagcccaccatttcatggaagaaagatggctctccactggatgataaagatgaaagaataactatacgaggaggaaagctcatgatcacttacacccgtaaaagtgacgctggcaaatatgtttgtgttggtaccaatatggttggggaacgtgagagtgaagtagccgagctgactgtcttagagagaccatcatttgtgaagagacccagtaacttggcagtaactgtggatgacagtgcagaatttaaatgtgaggcccgaggtgaccctgtacctacagtacgatggaggaaagatgatggagagctgcccaaatccagatatgaaatccgagatgatcataccttgaaaattaggaaggtgacagctggtgacatgggttcatacacttgtgttgcagaaaatatggtgggcaaagctgaagcatctgctactctgactgttcaagttgggtctgaacctccacattttgttgtgaaaccccgtgaccaggttgttgctttgggacggactgtaacttttcagtgtgaagcaaccggaaatcctcaaccagctattttctggaggagagaagggagtcagaatctacttttctcatatcaaccaccacagtcatccagccgattttcagtctcccagactggcgacctcacaattactaatgtccagcgatctgatgttggttattacatctgccagactttaaatgttgctggaagcatcatcacaaaggcatatttggaagttacagatgtgattgcagatcggcctcccccagttattcgacaaggtcctgtgaatcagactgtagccgtggatggcactttcgtcctcagctgtgtggccacaggcagtccagtgcccaccattctgtggagaaaggatggagtcctcgtttcaacccaagactctcgaatcaaacagttggagaatggagtactgcagatccgatatgctaagctgggtgatactggtcggtacacctgcattgcatcaacccccagtggtgaagcaacatggagtgcttacattgaagttcaagaatttggagttccagttcagcctccaagacctactgacccaaatttaatccctagtgccccatcaaaacctgaagtgacagatgtcagcagaaatacagtcacattatcgtggcaaccaaatttgaattcaggagcaactccaacatcttatattatagaagccttcagccatgcatctggtagcagctggcagaccgtagcagagaatgtgaaaacagaaacatctgccattaaaggactcaaacctaatgcaatttaccttttccttgtgagggcagctaatgcatatggaattagtgatccaagccaaatatcagatccagtgaaaacacaagatgtcctaccaacaagtcagggggtggaccacaagcaggtccagagagagctgggaaatgctgttctgcacctccacaaccccaccgtcctttcttcctcttccatcgaagtgcactggacagtagatcaacagtctcagtatatacaaggatataaaattctctatcggccatctggagccaaccacggagaatcagactggttagtttttgaagtgaggacgccagccaaaaacagtgtggtaatccctgatctcagaaagggagtcaactatgaaattaaggctcgccctttttttaatgaatttcaaggagcagatagtgaaatcaagtttgccaaaaccctggaagaagcacccagtgccccaccccaaggtgtaactgtatccaagaatgatggaaacggaactgcaattctagttagttggcagccacctccagaagacactcaaaatggaatggtccaagagtataaggtttggtgtctgggcaatgaaactcgataccacatcaacaaaacagtggatggttccaccttttccgtggtcattccctttcttgttcctggaatccgatacagtgtggaagtggcagccagcactggggctgggtctggggtaaagagtgagcctcagttcatccagctggatgcccatggaaaccctgtgtcacctgaggaccaagtcagcctcgctcagcagatttcagatgtggtgaagcagccggccttcatagcaggtattggagcagcctgttggatcatcctcatggtcttcagcatctggctttatcgacaccgcaagaagagaaacggacttactagtacctacgcgggtatcagaaaagtaacttaccagagaggaggcgaagctgtcagcagtggagggaggcctggacttctcaacatcagtgaacctgccgcgcagccatggctggcagacacgtggcctaatactggcaacaaccacaatgactgctccatcagctgctgcacggcaggcaatggaaacagcgacagcaacctcactacctacagtcgcccagggcagcctactccttacgccaccactcagctcatccagtcaaacctcagcaacaacatgaacaatggcagcggggactctggcgagaagcactggaaaccactgggacagcagaaacaagaagtggcaccagttcagtacaacatcgtggagcaaaacaagctgaacaaagattatcgagcaaatgacacagttcctccaactatcccatacaaccaatcatacgaccagaacacaggaggatcctacaacagctcagaccggggcagtagtacatctgggagtcaggggcacaagaaaggggcaagaacacccaaggtaccaaaacagggtggcatgaactgggcagacctgcttcctcctcccccagcacatcctcctccacacagcaatagcgaagagtacaacatttctgtagatgaaagctatgaccaagaaatgccatgtcccgtgccaccagcaaggatgtatttgcaacaagatgaattagaagaggaggaagatgaacgaggccccactccccctgttcggggagcagcttcttctccagctgccgtgtcctatagccatcagtccactgccactctgactccctccccacaggaagaactccagcccatgttacaggattgtccagaggagactggccacatgcagcaccagcccgacaggagacggcagcctgtgagtcctcctccaccaccacggccgatctcccctccacatacctatggctacatttcaggacccctggtctcagatatggatacggatgcgccagaagaggaagaagacgaagccgacatggaggtagccaagatgcaaaccagaaggcttttgttacgtgggcttgagcagacacctgcctccagtgttggggacctggagagctctgtcacggggtccatgatcaacggctggggctcagcctcagaggaggacaacatttccagcggacgctccagtgttagttcttcggacggctcctttttcactgatgctgactttgcccaggcagtcgcagcagcggcagagtatgctggtctgaaagtagcacgacggcaaatgcaggatgctgctggccgtcgacattttcatgcgtctcagtgccctaggcccacaagtcccgtgtctacagacagcaacatgagtgccgccgtaatgcagaaaaccagaccagccaagaaactgaaacaccagccaggacatctgcgcagagaaacctacacagatgatcttccaccacctcctgtgccgccacctgctataaagtcacctactgcccaatccaagacacagctggaagtacgacctgtagtggtgccaaaactcccttctatggatgcaagaacagacagatcatcagacagaaaaggaagcagttacaaggggagagaagtgttggatggaagacaggttgttgacatgcgaacaaatccaggtgatcccagagaagcacaggaacagcaaaatgacgggaaaggacgtggaaacaaggcagcaaaacgagaccttccaccagcaaagactcatctcatccaagaggatattctaccttattgtagacctacttttccaacatcaaataatcccagagatcccagttcctcaagctcaatgtcatcaagaggatcaggaagcagacaaagagaacaagcaaatgtaggtcgaagaaatattgcagaaatgcaggtacttggaggatatgaaagaggagaagataataatgaagaattagaggaaactgaaagctgaagacaaccaagaggcttatgagatctaatgtgaaaatcatcactcaagatgcctcctgtcagatgacacatgacgccagataaaatgttcagtgcaatcaga

SEQ ID NO: 7622 - DNA, 1024 bp, Homo sapiens
acgaccgccagactcgagcagtctctggaacacgctgcggggctcccgggcctgagccaggtctgttctccacgcaggtgttccgcgcgccccgttcagccatgtcgtccggcatccatgtagcgctggtgactggaggcaacaagggcatcggcttggccatcgtgcgcgacctgtgccggctgttctcgggggacgtggtgctcacggcgcgggacgtgacgcggggccaggcggccgtacagcagctgcaggcggagggcctgagcccgcgcttccaccagctggacatcgacgatctgcagagcatccgcgccctgcgcgacttcctgcgcaaggagtacgggggcctggacgtgctggtcaacaacgcgggcatcgccttcaaggttgctgatcccacaccctttcatattcaagctgaagtgacgatgaaaacaaatttctttggtacccgagatgtgtgcacagaattactccctctaataaaaccccaaggtgagtctgatgggaaacagcgcaccttctctttggggcttgatttggcccctgcttgcctgggatttctcctgcaggctcctgcttcctctccatgctgcacgtgcactgacctctgtgctttttctcctgccagctgatatgtgccattttgcctcaggactttgtcctcacttctcccactcccatggccattcgtcctccctgtcgcactggtctttgcacacctggctgactctcatccttcaggtcttagctcaaacgtctcctgagagatgctctttatttgctccattcccctctgcgtgggagtccatcctgtaccctttctctgctctttcagagagatcttattcaggctggtggaggctttactaccaccagttcattaggcccttctaatacctgtcacctgtctgaaacactccttaagctcccaaccacatggttgtcttgctgcctttccatctcttcctgatgcctttccccacaatctaagatatttccagaggatccctatcctttt

SEQ ID NO: 7623 - DNA, 1721 bp, Homo sapiens
gaagctcccggctggcggcagaaaccgggagtggggccgggcgagtgcgcggcatcccaggccggcccgaacgctccgcccgcggtgggccgacttcccctcctcttccctctctccttcctttagcccgctggcgccggacacgctgcgcctcatctcttggggcgttcttccccgttggccaaccgtcgcatcccgtgcaactttggggtagtggccgtttagtgttgaatgttccccaccgagagcgcatggcttgggaagcgaggcgcgaacccggcccccgaagggccgccgtccgggagacggtgatgctgttgctgtgcctgggggtcccgaccggccgcccctacaacgtggacactgagagcgcgctgctttaccagggcccccacaacacgctgttcggctactcggtcgtgctgcacagccacggggcgaaccgatggctcctagtgggtgcgcccactgccaactggctcgccaacgcttcagtgatcaatcccggggcgatttacagatgcaggatcggaaagaatcccggccagacgtgcgaacagctccagctgggtagccctaatggagaaccttgtggaaagacttgtttggaagagagagacaatcagtggttgggggtcacactttccagacagccaggagaaaatggatccatcgtgacttgtgggcatagatggaaaaatatattttacataaagaatgaaaataagctccccactggtggttgctatggagtgccccctgatttacgaacagaactgagtaaaagaatagctccgtgttatcaagattatgtgaaaaaatttggagaaaattttgcatcatgtcaagctggaatatccagtttttacacaaaggatttaattgtgatgggggccccaggatcatcttactggactggctctctttttgtctacaatataactacaaataaatacaaggcttttttagacaaacaaaatcaagtaaaatttggaagttatttaggatattcagtcggagctggtcattttcggagccagcatactaccgaagtagtcggaggagctcctcaacatgagcagattggtaaggcatatatattcagcattgatgaaaaagaactaaatatcttacatgaaatgaaaggtaaaaagcttggatcgtactttggagcttctgtctgtgctgtggacctcaatgcagatggcttctcagatctgctcgtgggagcacccatgcagagcaccatcagagaggaaggaagagtgtttgtgtacatcaactctggctcgggagcagtaatgaatgcaatggaaacaaacctcgttggaagtgacaaatatgctgcaagatttggggaatctatagttaatcttggcgacattgacaatgatggctttgaaggtaattaaaattatcaaattggtacttgatttctgcttttaaaatggtttatggaagaaaatatgattaaagttttgtattgttttccttcctatagaagatggagccagaatggcatgctaagttttttcttttctttagtgttatatatgacttctcctcaattgtcacccattgatctttaccactgttaataatggatgatattcaaaataccttatttcagtgattctaaggcaccattgattagaaactgcattattatttatgtgtccctaaaagctacctattaagctgttacacccaccatttttctg

SEQ ID NO: 7624 - DNA, 596 bp, Homo sapiens
tctacagcctattcccctacagcagctagagtgacccaaactctgatcggcatctctgacagctcttggaactcaagagctatgcagtaattatttttgaagacatgaataaatgctcagatgaagatctgcccttgggtgaaagtactggatataaaaagatgaaatagacgcaagagacatctcgaaggatgcaagagataccacaaaggatgacttgcctggctgacagcgtgtggaagaaacaggagaccaaggaattgaagtgaactccaggtatcttgagtggaacagaggaagaagacgaaaaatggaaaatgtcaccaagtctttttcttcctgcaatgaaggaaggatgtaacgcatacaaagaaatctggatgaaaaaagatgagtcttggaatttctctcaggactatgatccagaactgatcaaagaggagaaacgaaaagaattacagtcagagatcaggatacaggttgatgagttgatgagacaggaacttaaaaacttaaagctagctgtggacagagaaagggagcgcccagtgaaagcaggaaagaaaaaggacaagaaaggaaagaaaggcaaaaag

SEQ ID NO: 7625 - DNA, 1888 bp, Homo sapiens
agccaacgaggggaagaaaggagttggggcaaaacaggaggcgtttccctacccgcatacatccccgtccccgagacacccaatccccccacccccagcctgcccgcgcctcccgcccccagctcctcgccctggggacagctggcagccccgcgcggaccagacacaaagccgatcaatcccggaggcgtgggggcggagggacgacccgccggggctttcccgggcgctgctctcctcctgctgccccctcgctaggacccggcggacgcctcgtctggttttcacgccctctagcccctacccccacacccccaaaacagaacagacccccatccctgggctggaggacccgcctcttggcagccagctgagaaggcgccccggggagggggaaactgacatcccatctagagccgtccctcctcttcctcccctcccgactctctgctcctttcccgccccagaagttcaagggcccccggcctcctgcgctcctgccgccgggaccctcgacctcctcagagcagccggctgccgccccgggaagatggcgaggaggagccgccaccgcctcctcctgctgctgctgcgctacctggtggtcgccctgggctatcataaggcctatgggttttctgccccaaaagaccaacaagtagtcacagcagtagagtaccaagaggctattttagcctgcaaaaccccaaagaagactgtttcctccagattagagtggaagaaactgggtcggagtgtctcctttgtctactatcaacagactcttcaaggtgattttaaaaatcgagctgagatgatagatttcaatatccggatcaaaaatgtgacaagaagtgatgcggggaaatatcgttgtgaagttagtgccccatctgagcaaggccaaaacctggaagaggatacagtcactctggaagtattagtggctccagcagttccatcatgtgaagtaccctcttctgctctgagtggaactgtggtagagctacgatgtcaagacaaagaagggaatccagctcctgaatacacatggtttaaggatggcatccgtttgctagaaaatcccagacttggctcccaaagcaccaacagctcatacacaatgaatacaaaaactggaactctgcaatttaatactgtttccaaactggacactggagaatattcctgtgaagcccgcaattctgttggatatcgcaggtgtcctgggaaacgaatgcaagtagatgatctcaacataagtggcatcatagcagccgtagtagttgtggccttagtgatttccgtttgtggccttggtgtatgctatgctcagaggaaaggctacttttcaagtaaatctggcagacctaactttggctctatgggcgtagagagaagatggatgacaaactatctgaggctatggcagctgggagtggagaagatatactgaagccatggcttcagacagtttgtcatctcctaattcctttgaagaatcatctgccattgacttcctgttcccagatttctggctcaatcctggtctctcagtctcgaagagtaattcttcatctaaagccacgacaatgagtgaaaatgatttcaagcacacaaaatcctttataatttaaagactccactttagagatacaccaaagccaccgttgttacacaagttattaaactattataaaactctgctttgtccgacatttgcaaagaggtacacgaggaaatggaattggtatttcattttaattttcatgactactaactcacctgaacttgctattttaaacaaatagttctgtcgacacctaaaatataatctggcttcttgtgtctggactaagttaaaagaattaaaatactttgtaatgtc

SEQ ID NO: 7626 - DNA, 416 bp, Homo sapiens
tcagtctccaaaaaggtccgcataattgatatataaggggcttcagtgtgtagcaaagttgcaaaagttaagagttgttgtttgtcttcgatcatgtctggtagaggcaaaggtggtaaaggtttaggaaagggaggcgccaagcgccatcgcaaagtgctgcgtgacaacatacagggcatcacgaagcccgccatccgtcgcttggcccgacgcggcggcgtgaaacgcatttcgggcctcatttatgaggagacccgcggtgttcttaaggtgttcctggagaatgtgatacgggacgccgtaacctacacggagcacgccaagcgtaagacagtcactgcaatggatgttgtctacgcgctcaagcgccagggacgcactctgtacggctttggtggctgagcctcaccccg

SEQ ID NO: 7627 - DNA, 2475 bp, Homo sapiens
atggctcagttctattacaaaagaaatgttaatgctccctatagagaccgcatccctctaaggatagtaagagcagaatcagaactctcgccatcagaaaaagcctacttgaatgctgtggaaaagggagattatgccagtgtcaagaaatccctagaggaagctgaaatttattttaaaatcaatattaattgcattgatcctctcggaagaactgctctcctcattgcaattgaaaatgagaacttggagctcatcgaactactcttaagctttaatgtctatgttggagatgctctattacatgctatcagaaaagaagtcgtcggagctgttgagctgttattgaaccacaaaaaacctagtggagaaaaacagtttgttgcccagcccaattgtcaacagctgctggcatctcgctggtacgatgagtttccaggctggaggagaagacactgggcagtgaagatggtgacatgtttcataataggacttctttttcctgtcttctctgtgtgctacctgatagctcccaaaagcccacttggactgttcatcaggaagccatttatcaagtttatctgccacacagcctcctatttgacttttttgttcctgctgctgcttgcctctcagcacatcgacaggtcagacttgaacaggcaaggtccaccaccaaccatcgtcgagtggatgatattaccgtgggtcctgggcttcatatggggagaaattaaacagatgtgggatggcggacttcaggactacatccatgattggtggaatctaatggactttgtaatgaactccttatatttagcaacaatctccttgaaaattgttgcatttgtaaagtacagtgcccttaatccacgagaatcatgggacatgtggcatcccactctggtggcagaggctttatttgctattgcaaacatcttcagttctctgcgtctgatctcactgtttactgcaaattctcacctgggacctctgcaaatatctctgggaagaatgctcctggacattttgaagtttctattcatatactgccttgtgttgctagcatttgcaaatggcctaaatcaattgtacttctattatgaagaaacgaaagggttaacctgcaaaggcataagatgtgaaaagcagaataatgcattttcaacgttatttgagacactgcagtccctgttttggtcaatatttgggctcatcaatttatatgtgaccaatgtcaaagcacagcatgaatttactgagtttgttggtgccaccatgtttgggacatacaatgtcatctctctggttgttctactcaacatgttaatagctatgatgaataattcttaccaactgattgctgaccatgcagatatagaatggaaatttgcacgaacaaagctttggatgagttattttgaagaaggaggtactctgcctactcccttcaatgtcatcccgagccccaagtctctctggtacctgatcaaatggatctggacacacttgtgcaagaaaaagatgagaagaaagccagaaagttttggaacaatagggaggcgagctgctgataacttgagaagacatcaccaataccaagaagttatgaggaacctggtgaagcgatacgttgctgcaatgattagagatgctaaaactgaagaaggcctgaccgaagagaactttaaggaactaaagcaagacatttctagtttccgctttgaagtcctgggattactaagaggaagcaaactttccacaatacaatctgcgaatgcctcgaaggagtcttcaaattcggcagactcagatgaaaagagtgatagcgaaggtaatagcaaggacaagaaaaagaatttcagcctttttgatttaaccaccctgattcatccgagatcagcagcaattgcctctgaaagacataacataagcaatggctctgccctggtggttcaggagccgcccagggagaagcagagaaaagtgaattttgtgaccgatatcaaaaactttgggttatttcatagacgatcaaaacaaaatgctgctgagcaaaatgcaaaccaaatcttctctgtttcagaagaagttgctcgtcaacaggctgcaggaccacttgagagaaatattcaactggaatctcgaggattagcttcacggggtgacctgagcattcccggtctcagtgaacaatgtgtgttagtagaccatagagaaaggaatacggacacactggggttacaggtaggaaagagagtgtgtccattcaagtcagagaaggtggtggtggaggacacggttcctataataccaaaggagaaacatgcaaaagaagaggactctagtatagactatgatctaaacctcccagacacagtcacccacgaagattacgtgaccacaagattgtgatacttgaaggaggaagcgtttaccatacacatacgtattttccgtagtgctctgggtggg

SEQ ID NO: 7628 - DNA, 5750 bp, Homo sapiens
ctcaaggccaagtagaccttacttgacctgactccacagctcaaaatgtacaccttttaactgcttgagtccaggaggctaaggttgtagtgagccaagatcatgccactgcactctagcctgagtgacagagtgagactctgtctcaagaaaaaaaatatatatatatacctttaaaaatattctatagattttaagagtttttatcaactctttctggttatgaaaggaacatatgttcattatagaaaacttagagaatacagaaaactgttttcaaaaaggtaaaacacctaatccaaccactcagaactaactggagactaggggaagaagagcattaatccctgctgtccccagcagaaggttggcagcagcctctgggagaggcctgcctgtcccaccagggccaagggtttctcccactccatctggcacttgctaataagcagctcatacctgggtggcccagcagcaggcaggcaccaggcttggcaacagcacggctctcaggaggggccaccagggcaaagctcagcactgatggccatagctttacctgccaggaagccaaatgccacccgagttgctggggtgtccaggagctgtgactctgcctcctagctacagaatctgaacacccgtgaggcaccatcccagggcacctgtggaccaggagcagacagagcctaacaggcccctgatgtggaagaaaggatttcagtggcattcatggggaggacagtggttgaaagtcagaatattcctctccaagtagcagaaatgcaataatgaggcgattccgagtgatggctatgactggtgggaagatttgctcatcatttgggaagggagaatgatgggaagctccaaaatcaatttcctccttcctggaggcttgcaggaatgatctcatctctcatgtgtgcagcctgggcctctcaatccttacaatagccctgaggcagcatacattaagcctttttacaaatgaggaaactgtatcagagagattaattaacttgcccaagatcacacagctaatacccagcagacccagagtgtgagaccatggctgattccaaatcctgcttcctttctagcctcccttagctccctttaaagtataaaatgctcttctattgacctatgcactaagttgtggcagttagtcagtcagccagtctgttagctggttggttagttaccttttctctctggcactctgtcctgcttgttgcaaggttttatggggagaacggcatcttaggctttgtcttgtggggactcaggtggacatcagctcctagtgcctgcccagcctgttcctctccctccgtgcacctctcctttgtggaagctgcagagtgaagtattctggacccatcccatcttcccctggccctgccctttccacaggtaactacctgatcatgccctcagggaacctccagattgtgaatgccagccaggaggacgagggcatgtacaagtgtgcagcctacaacccagtgacccaggaagtgaaaacctccggctccagcgacaggctacgtgtgcgccgtaaggcccgggcccacctgctgggggatgggggatcactgatggaagggctcacaaagatggaaagggaggtagatacctggaggtgccacatccaagctccagttctgtgtgcactggctttggccagggggacagccaggggttctcagccagggattctctcccctctggccggcctcagggccagcatctcacagcacacagcaccaggcgactgcctgctgccacacctgcctgatgggaggtttccttcacggttactttgcgattgggatgggtcagaatgtgtgtgctgggacaggacggtgggtcttgtctcaagctcagcagcggacacagcatgtgcctagaacagatggccacgtgggaggcctccaggctgctgttctgccctatatgaggtccctgggcctgcactctctgcactgatgaggtgtgccctgcaccaccctctggtgagcttccgggaggcccacatgctctcaatgcacaggaaaacagcagctacctttctgtgcgcttgcctggatccctgccaattcaaaggagtgacatcttacacggagttaggcttagagttggcaccagagatggaatcactgtgaagctaatgaagttaaacttccatcgtctttcactcactgacagaagcctcacaaggccctaactttgtatgtatcattttccattctttttggggcctccgaaactgtataaatttcaggttttagaaaacctgggtgtgtccctggttggcatataaagcggaatcacacatagtccccttgctccttgaaggttgctgaggaacggcacacattagagagtaaacaggcctttcagtgagttctctgcagtttgtccacagtgttgaaaaaagattacagctttcccagctgtgcacctgaggaagtacataggtgatttgcatttggggaccttgcaatatgagaaatgcatgtgtttaaacagtggattccattcagctcagccggaggccggctctgagatgctcactgagagacagttgggcctgagaaccatagggtggggttgagagcatggcagattcttgtttcccatctcatcttcagcctcacagcgcacatactgagtgcaagcagaaagaaatatctgtaccatttaaactgcctctacactccctcacctttctctctttgccagcacacagttaactgtgcatatgttatgttgatgctgctgttcttctgtgttatctcatttcttactcataacagctccctgcagaagcagtccttgtttctgataaggacaccaagccccaagggaattctgtagcacgccccactctacataggttgaaagacccggaatggctgtttgatcccatctccatgctctctgggactgcctcctgggcatgctctacaggacatcctggtccacacgccttctgtccttgccctccttgcccctccaggctccaccgctgaggctgcccgcatcatctaccccccagaggcccaaaccatcatcgtcaccaaaggccagagtctcattctggagtgtgtggccagtggaatcccacccccacgggtcacctgggccaaggatgggtccagtgtcaccggctacaacaagacgcgcttcctgctgagcaacctcctcatcgacaccaccagcgaggaggactcaggcacctaccgctgcatggccgacaatggggttgggcagcccggggcagcggtcatcctctacaatgtccaggtgtttgaaccccctgaggtcaccatggagctatcccagctggtcatcccctggggccagagtgccaagcttacctgtgaggtgcgtgggaaccccccgccctccgtgctgtggctgaggaatgctgtgcccctcatctccagccagcgcctccggctctcccgcagggccctgcgcgtgctcagcatggggcctgaggacgaaggcgtctaccagtgcatggccgagaacgaggttgggagcgcccatgccgtagtccagctgcggacctccaggccaagcataaccccaaggctatggcaggatgctgagctggctactggcacacctcctgtatcaccctccaaactcggcaaccctgagcagatgctgagggggcaaccggcgctccccagacccccaacgtcagtggggcctgcttccccgcagtgtccaggagagaaggggcagggggctcccgccgaggctcccatcatcctcagctcgccccgcacctccaagacagactcatatgaactggtgtggcggcctcggcatgagggcagtggccgggcgccaatcctctactatgtggtgaaacaccgcaaggtcacaaattcctctgacgattggaccatctctggcattccagccaaccagcaccgcctgaccctcaccagacttgaccccgggagcttgtatgaagtggagatggcagcttacaactgtgcgggagagggccagacagccatggtcaccttccgaactggacggcggcccaaacccgagatcatggccagcaaagagcagcagatccagagagacgaccctggagccagtccccagagcagcagccagccagaccacggccgcctctcccccccagaagctcccgacaggcccaccatctccacggcctccgagacctcagtgtacgtgacctggattccccgtgggaatggtgggttcccaatccagtccttccgtgtggagtacaagaagctaaagaaagtgggagactggattctggccaccagcgccatccccccatcgcggctgtccgtggagatcacgggcctagagaaaggcacctcctacaagtttcgagtccgggctctgaacatgctgggggagagcgagcccagcgccccctctcggccctacgtggtgtcgggctacagcggtcgcgtgtacgagaggcccgtggcaggtccttatatcaccttcacggatgcggtcaatgagaccaccatcatgctcaagtggatgtacatcccagcaagtaacaacaacaccccaatccatggcttttatatctattatcgacccacagacagtgacaatgatagtgactacaagaaggatatggtggaaggggacaagtactggcactccatcagccacctgcagccagagacctcctacgacattaagatgcagtgcttcaatgaaggaggggagagcgagttcagcaacgtgatgatctgtgagaccaaagctcggaagtcttctggccagcctggtcgactgccacccccaactctggccccaccacagccgccccttcctgaaaccatagagcggccggtgggcactggggccatggtggctcgctccagcgacctgccctatctgattgtcggggtcgtcctgggctccatcgttctcatcatcgtcaccttcatccccttctgcttgtggagggcctggtctaagcaaaaacatacaacagacctgggttttcctcgaagtgcccttccaccctcctgcccgtatactatggtgccattgggaggactcccaggccaccaggccagtggacagccctacctcagtggcatcagtggacgggcctgtgctaatgggatccacatgaataggggctgcccctcggctgcagtgggctacccgggcatgaagccccagcagcactgcccaggcgagcttcagcagcagagtgacaccagcagcctgctgaggcagacccatcttggcaatggatatgacccccaaagtcaccagatcacgaggggtcccaagtctagcccggacgagggctctttcttatacacactgcccgacgactccactcaccagctgctgcagccccatcacgactgctgccaacgccaggagcagcctgctgctgtgggccagtcaggggtgaggagagcccccgacagtcctgtcctggaagcagtgtgggaccctccatttcactcagggcccccatgctgcttgggccttgtgccagttgaagaggtggacagtcctgactcctgccaagtgagtggaggagactggtgtccccagcaccccgtaggggcctacgtaggacaggaacctggaatgcagctctccccggggccactggtgcgtgtgtcttttgaaacaccacctctcacaatttaggcagaagctgatatcccagaaagactatatattgtttttttttt

SEQ ID NO: 7629 - DNA, 1442 bp, Homo sapiens; identical to SEQ ID NO: 4502

SEQ ID NO: 7630 - DNA, 501 bp, Homo sapiens
gtggtagttggattttcggcagcactaggatacagatattatggcacaaccaaagtatgttggcttagcaccgaaaacaactttatttggagttttataggaccagcatgcctaatcattcttgttaatctcttggcttttggagtcatcatatacaaagtttttcgtcacactgcagggttgaaaccagaagttagttgctttgagaacataaggtcttgtgcaagaggagccctcgctcttctgttccttctcggcaccacctggatctttggggttctccatgttgtgcacgcatcagtggttacagcttacctcttcacagtcagcaatgctttccaggggatgttcatttttttattcctgtgtgttttatctagaaagattcaagaagaatattacagattgttcaaaaatgtcccctgttgttttggatgtttaagctgttgaaatgaagtctgccaaatcttgctctaacaaataaaatgttatctaaatgaa

SEQ ID NO: 7631 - DNA, 2486 bp, Homo sapiens
acattatctctgagagcactcgcagatgctgagcctgcagagacagagaaactggcagctgaccagggtcagggatggtcatgtattcaaatattgtgggttttagtcaagtgtgctccacccgattcaacaatgtgatgtgactgctcctagcaactattttgatatggtgaatgttgttaagcataggacctaagaagaggtggcagtctctttcctctccgcacttggcaggccacccactcattcctgataatcacatttaagagagctctggacaagctggaatgcatccaagagaatccctcaacatgctggtggctttctagaagatgaccatagaggaccttccagattttccattagaaggaaatcctttgtttggaagatacccatttatattttctgcttctgataccccagttatcttttccatttctgcagcaccaatgccttcagactgtgaattttctttctttgatcctaatgatgcatcatgccaggaaattctttttgatcccaaaacttcagtttcagaattatttgccattttgagacagtgggttcctcaggtccaacaaaacattgacattattggaaatgagattcttaagagaggttgcaatgtgaatgatagagatggattgacagatatgactcttttacattatacctgcaaatctggagctcatggtattggtgatgtggaaacagctgtaaaatttgcaactcagcttattgacctgggagcagacattagtttgcggagtcgctggacaaacatgaatgctttgcattatgctgcttattttgatgtccctgaacttataagagtgattttgaaaacatcgaaaccaaaagatgtggatgccacttgcagtgattttaattttggaacagctttgcatattgcagcatacaacttgtgtgcaggtgctgtgaagtgcctcttggagcagggagcaaatcctgcatttaggaatgacaaaggacagatccctgctgatgttgttccagacccagtagatatgccgttagagatggctgacgccgcagccactgctaaggaaatcaagcagatgcttctagatgcggtgcctctgtcatgtaacatctcaaaggccatgctcccaaattatgatcatgtcactggcaaggcaatgcttacgtcacttggcctgaagttgggggatcgtgttgttattgcaggacagaaggttggtacattaagattttgtggaacaactgaatttgcaagtgggcagtgggctggcattgaactggatgaaccagaaggaaaaaataatggaagtgttggaaaagtccagtactttaaatgtgcccccaagtatggtatttttgcacctctttcaaagataagtaaagcaaaaggtcgaaggaagaatataacacacactccttctacaaaagctgctgtacctctcatcaggtcccagaaaattgacgtagctcatgtgacgtcaaaagtaaatactggattaatgacatcaaaaaaagatagtgcttctgagtcaacactttcattgcctcctggtgaagaacttaaaactgtgacagagaaagatgttgccctgcttggatctgtcagcagctgctcctctacatcttctttggaacacagacagagctaccccaagaaacagaatgcaatcagcagtaacaagaagacaatgagcaaaagcccttccctttcatccagagccagtgctggtttgaattcctcagcaacatctacagcaaataatagccgttgcgagggggaactccgcctcggagagagagtgttagtggtaggacagagactgggcaccattaggttctttgggacaacaaacttcgctccagttctaggatattggtatggtatagagcttgaaaaaccccatggcaagaatgatggttcagttggaggtgtgcagtattttagctgttctccaagatatggaatatttgctcccccatccagggtgcaaagagtaacagattccctggataccctttcagaaatttcttcaaataaacagaaccattcttatcctggttttaggagaagttttagcacaacttctgcttcttcccaaaaggagattaacagaagaaatgctttttccaaatcgaaagctgctttgcgtcgcagttggagcagcacccccaccgcaggtggcattgaagggagcgtgaagctgcacgaggggtctcaggtcctgctcacgagctccaatgagatgggtactgttaggtatgtgggccccactgactttgcttcaggtatctggcttggacttgagctccgaagcgccaagggaaaaaatgatgggtcagtgggtgacaagcgctatttcacctgtaagccgaaccatggagtcttagttcgaccgagcagagtgacctatcggggaattaatgggtcaaaacttgtggatgagaattgttaagcttctaaaatattaaataagctcaaatat

SEQ ID NO: 7632 - DNA, 6231 bp, Homo sapiens
gtcatgcatacattagagcctctgatgagtttgtctttggggactctggggctgtactacccagtgtcatcacaaattaccaggagaaattgcttccagctcacaatcacatctgcttttggcaagaactaatgcaccaagacttcaagttctaagcctctgttcagattttaattgcaattgatcaggtttatattattgtacctccagagacctcctagagccagaacccggctggcttgctgtttcctttagagcagcgcatatcattatttggtgttctggtggaggacttttctgatggcagaaattagtttctctgggttcatcaggacgggatgcttcaagatttaagtgcaagtgtcttctttccaccttgttcacaacacagaacgttagtggcttttcatggcctgccactgaaaatcaagaaagaaccccacagtccatgttcagaaatcagctctgcctgcagtcaagaacagccctttaaattcagctatggagaaaagtgcctgtacaatgtcagtgcctatgatcagaagccacaagtgggaatgaggccctccaacccccccacaccatccagcacgccagtgtccccactgcatcatgcatctccaaactcaactcatacaccgaaacctgaccgggccttcccagctcacctccctccatcgcagtccataccagatagcagctaccccatggaccacagatttcgccgccagctttctgaaccctgtaactcctttcctcctttgccgacgatgccaagggaaggacgtcctatgtaccaacgccagatgtctgagccaaacatccccttcccaccacaaggctttaagcaggagtaccacgacccagtgtatgaacacaacaccatggttggcagtgcggccagccaaagctttccccctcctctgatgattaaacaggaacccagagattttgcatatgactcagaagtgcctagctgccactccatttatatgaggcaagaaggcttcctggctcatcccagcagaacagaaggctgtatgtttgaaaagggccccaggcagttttatgatgacacctgtgttgtcccagaaaaattcgatggagacatcaaacaagagccaggaatgtatcgggaaggacccacataccaacggcgaggatcacttcagctctggcagtttttggtagctcttctggatgacccttcaaattctcattttattgcctggactggtcgaggcatggaatttaaactgattgagcctgaagaggtggcccgacgttggggcattcagaaaaacaggccagctatgaactatgataaacttagccgttcactccgctattactatgagaaaggaattatgcaaaaggtggctggagagagatatgtctacaagtttgtgtgtgatccagaagcccttttctccatggcctttccagataatcagcgtccactgctgaagacagacatggaacgtcacatcaacgaggaggacacagtgcctctttctcactttgatgagagcatggcctacatgccggaagggggctgctgcaacccccacccctacaacgaaggctacgtgtattaacacaagtgacagtcaagcagggcgtttttgcgcttttccttttttctgcaagatacagagaattgctgaatctttgttttatttctgttgtttgtattttatttttaaataataatacacaaaaaggggcttttcctgttgcattattctatggtctgccatggactgtgcactttatttgagggtgggtgggagtaatctaaacatttattctgtgtaacaggaagctaatgggtgaatgggcagagggatttggggattactttttacttaggcttgggatggggtcctacaagttttgagtatgatgaaactatatcatgtctgtttgatttcataacaacataagataatgtttattttatcggggtatctatggtacagttaatttcacgttgtgtaaatatccacttggagactatttgccttgggcattttcccctgtcatttatgagtctctgcaggtgtacaaaaaaaccccaatctactgtaaatggcagtttaattgttagaaatgactgtttttgcaccacttgtaaaaaggtatttagcgattgcatttgctgtttgttgttttattttgctttatatatgacttgcagaggataaccataaaatgggtaattctctctgaagttgaataatcaccatgactgtaaatgaggggcacaattttggactctggcgccaaactgagtcataggccagtagcattacgtgtatctggtgccaccttgctgtttagatacaaatcataccgtcttttaaatattttgaagcccatttcagttaaataatgacatgtcatggtcctttggaatcttcatttaaatgttaaatctggaatcaaaatgaagcaaaaaatatctgtctccttttcactttcttcagtacataaatacattatttaatcaataagaattaactgtactaaatcatgtattatgctgttctagttacagcaaacactctttaagaaaaatatccaatacactaaataggtactatagtaatttttagacatggtacccattgatatgcatttaaaccttttactgctgtgttatgttgataacatatataaatattagataatgctaatgcttctgctgctgtcttttctgtaatattctctttcatgctgaatttactatgaccatttataagcagtgcagttaactacagatagcatttcaggacaaaatagatgactcaaaccatttattgcttaaaaaatagcttacgccatgctatgctataagcagcttttatgcacattgacaaatgaagagtaagcttcagcttgctaaaggaaactgtggaaccttttgtaacttttggtgatatggaaaattatttacaaaccgtcaaagaatatgaggaagttgctgtatgacatagtgctggcactgatattatccatcatctctttttggacacttctgtaaatgtgattggattgtttgaaagaagatttaaagtttcaaagttttttgttctgtttttgctttgcatttggagaaaatattgaaagcagggtatgttgtttcattcaccttgaaaaaaccatgagtaaatggggatatagaatctctgaatagctcgctaaaagattcaagcaagggacatgaattttgttccatctatcaataatatccagaagaacaacttttttaaagagtctatagcaaaaagcaaaaaaaaaaaaaaattctaaacacaaagtcaaaataaacctattgtaaaagcatttcgtgatgagcatgaaaaagattgtttaaagatgatccccccagctacccattttccaaaactacacagatcacagctcatttctctaagtggagcagttatcaagaaacccaaacaccaaaattgctactcttcacatttaatcctacaaaaagtactccaatttcaaaatatgtatgtaacctgcgatttcaatgattgttgttcatatacatcatgtattattttggcccattttgggcctaaaaaagaaaactatgccttaaaaatcagaaccttttctccccactatgcttatgtggccatctacagcacttagaataaaaacagatgttaaaatattcagtgaaagttttattggaaaaaggaattgagatatataattgagatttggtgaaattgaaggagaaaatttaagtgagtctttaaaatatattctgaatgaaaactgtattgaggattcatttttgttccttttttttctttttctcttttctcctttttcttctttttaatagtctagttttagtcagtcagtgaggaagaattgggccatgctaacgttatcacaagagaacaatggcagaaatggtattagttatataatatttaaggacaaactatatgttttgctgttttaacgtagtgactcactgaactaaatacataattgaccaacattaagtgtatttccaatacagaagggttgaaaatattacattataaactcttttgaaaaatgtatctaaaattttttaagttctgttttgattccactttttggttgagtttttatgtttttgttttcaggtagattaataaatctggcagctgatttctgcaagattcttgtgttttgaatttctcattgaattggctactcaaacatagaaatcatttgttaatgatgtaatgtcttctctcagcttttatcttcactgctgtttgctgtctcttgatgatgacatgttaatacccaatagattaattgcaacaaacacttatactcaaataactaagtaaaaataatttttcttgttatgtccatgaaaagtgcttcagaataaaaatccacaagactgacagtgcagaacatttttctcaaatcatgggcggatcttggaggtctagtttcccgtagatgctgtaaccaattaccacaacttcagtaatttacacaaatttatcttatagttctggaggcagaagttcaaaagaagccttaagagactaaaaccaagatgtccttaggtctggttccttctggaggctccaggggagattcttccagctttcacttctagagtctgctgacattccttggctcctggctacatcacttcaatctctgcttccatggtcacatactcttctactatagtcaaatttccttcctgcctcttataaggatgcttgtgattacatttaggggatgctcagataatccaggacaatctctccatctcaagatccttaacttaatgacgtgtgccaagtccctttggctagataattattcataggtcccagggattaggacatggatgtaaggggtgagggcagggctgttattcagaacaccgcacggaggaggaagactgtgtagcaaagactctaattgatttactcaggaacagtggagttctgctgagggatctaggatttgaaagtactagagtttgcttttatttaccactgagatattttccccttattctgcataaataattttgaaaactttctatattaaatttcaactattccactaaaatgtctggtaatcacatcaagcctttagattattcaaatccttccccagcccccaggaaaacactaagtcatgaaacagaaaaacagaaggtatgataataatagtaataacagttaaatcagtggtctaatccagattttattttttaatacatttcttttggtgttaatatgggttactatgtgatcttatcatttgctagtgattattacttattaggtaagaacaatgtgtaaaatatgtctattactcaaaagaacaattgcaaaatgagtcaacttatctttatataaccaggaaagaaatatattgccagaagctacagaattttgccagatgatagggatttctaaaatgagccactttgtctatcatgcagccttttcagagcttgtaatgagaaaacattacagaggagaaggtcatttggatgtttgttacttggaatcctagaaaacaaaaactaaaatttaaaaataagaagtgagtaagctattttccatttgcgatttggtatggagaagagaggaaatagaattattaaaaaaatacaaattgggtaaaagtgatggtggaaaaaatataaagaaggcaaatgtacatattaagcaattctactaagaattggaaaaatcaagtttcaaaaagatggtaatagttgggcatgatactagaaaatttcacccagtttattcagagctcaactagtacttttaggacttctttttttatatacatgagactcactttgacatacttaaaaaaaaaacagtttatggaaagtacagtttaagaggagaatttgattagactaagtggatatctttatagaaatattaatgatttcagaattttcagttacaagtgtatataccgtggctattgtttatggattcatatgtaaggtagggtcttttttgcatatagactccagtattagttactttcattctaaaattatatttatgcttctatggggaagaaaatttttaattcacttggttgtattaaaattatacttacggtttgagaaaacatgctatgaaaatcatgattatagcaaattaaatatgctcaaaatttaaatctaaaataaaagcccagaaactg

SEQ ID NO: 7633 - DNA, 1339 bp, Homo sapiens; identical to SEQ ID NO: 3706

SEQ ID NO: 7634 - DNA, 4078 bp, Homo sapiens
ccaccggccctctcctggtgccattcacactcaacttcaccatcactaacctacagtatgaggagaacatgggtcaccctggctccaggaagttcaacatcacggagagtgttctgcagggtctgctcaagcccttgttcaagagcaccagtgttggccctctgtattctggctgcagactgaccttgctcaggcctgagaaggatggagtagccaccagagtggacgccatctgcacccaccgccctgaccccaaaatccctgggctagacagacagcagctatactgggagctgagccagctgacccacagcatcactgagctgggaccctacaccctggatagggacagtctctatgtcaatggtttcacccagcggagctctgtgcccaccaccagcactcctgggactttcacagtacagccggaaacctctgagactccatcatccctccctggccccacagccactggccctgtcctgctgccattcaccctcaattttaccatcactaacctgcagtatgaggaggacatgcgtcgccctggctccaggaagttcaacaccacggagagggtccttcagggtctgcttatgcccttgttcaagaacaccagtgtcagctctctgtactctggttgcagactgaccttgctcaggcctgagaaggatggggcagccaccagagtggatgctgtctgcacccatcgtcctgaccccaaaagccctggactggacagagagcggctgtactggaagctgagccagctgacccacggcatcactgagctgggcccctacaccctggacaggcacagtctctatgtcaatggtttcacccatcagagctctatgacgaccaccagaactcctgatacctccacaatgcacctggcaacctcgagaactccagcctccctgtctggacccatgaccgccagccctctcctggtgctattcacaattaacttcaccatcactaacctgcggtatgaggagaacatgcatcaccctggctctagaaagtttaacaccacggagagagtccttcagggtctgctcaggcctgtgttcaagaacaccagtgttggccctctgtactctggctgcagactgaccttgctcaggcccaagaaggatggggcagccaccaaagtggatgccatctgcacctaccgccctgatcccaaaagccctggactggacagagagcagctatactgggagctgagccagctgacccacagcatcactgagctgggcccctacaccctggacagggacagtctctatgtcaatggtttcacacagcggagctctgtgcccaccactagcattcctgggacccccacagtggacctgggaacatctgggactccagtttctaaacctggtccctcggctgccagccctctcctggtgctattcactctcaacttcaccatcaccaacctgcggtatgaggagaacatgcagcaccctggctccaggaagttcaacaccacggagagggtccttcagggcctgctcaggtccctgttcaagagcaccagtgttggccctctgtactctggctgcagactgactttgctcaggcctgaaaaggatgggacagccactggagtggatgccatctgcacccaccaccctgaccccaaaagccctaggctggacagagagcagctgtattgggagctgagccagctgacccacaatatcactgagctgggcccctatgccctggacaacgacagcctctttgtcaatggtttcactcatcggagctctgtgtccaccaccagcactgccagccatctcctgatactattcaccctcaacttcaccatcactaacctgcggtatgaggagaacatgtggcctggctccaggaagttcaacactacagagagggtccttcagggcctgctaaggcccttgttcaagaacaccagtgttggccctctgtactctggctgcaggctgaccttgctcaggccagagaaagatggggaagccaccggagtggatgccatctgcacccaccgccctgaccccacaggccctgggctggacagagagcagctgtatttggagctgagccagctgacccacagcatcactgagctgggcccctacacactggacagggacagtctctatgtcaatggtttcacccatcggagctctgtacccaccaccagcaccggggtggtcagcgaggagccattcacactgaacttcaccatcaacaacctgcgctacatggcggacatgggccaacccggctccctcaagttcaacatcacagacaacgtcatgcagcacctgctcagtcctttgttccagaggagcagcctgggtgcacggtacacaggctgcagggtcatcgcactaaggtctgtgaagaacggtgctgagacacgggtggacctcctctgcacctacctgcagcccctcagcggcccaggtctgcctatcaagcaggtgttccatgagctgagccagcagacccatggcatcacccggctgggcccctactctctggacaaagacagcctctaccttaacggttacaatgaacctggtccagatgagcctcctacaactcccaagccagccaccacattcctgcctcctctgtcagaagccacaacagccatggggtaccacctgaagaccctcacactcaacttcaccatctccaatctccagtattcaccagatatgggcaagggctcagctacattcaactccaccgagggggtccttcagcacctgctcagacccttgttccagaagagcagcatgggccccttctacttgggttgccaactgatctccctcaggcctgagaaggatggggcagccactggtgtggacaccacctgcacctaccaccctgaccctgtgggccccgggctggacatacagcagctttactgggagctgagtcagctgacccatggtgtcacccaactgggcttctatgtcctggacagggatagcctcttcatcaatggctatgcaccccagaatttatcaatccggggcgagtaccagataaatttccacattgtcaactggaacctcagtaatccagaccccacatcctcagagtacatcaccctgctgagggacatccaggacaaggtcaccacactctacaaaggcagtcaactacatgacacattccgcttctgcctggtcaccaacttgacgatggactccgtgttggtcactgtcaaggcattgttctcctccaatttggaccccagcctggtggagcaagtctttctagataagaccctgaatgcctcattccattggctgggctccacctaccagttggtggacatccatgtgacagaaatggagtcatcagtttatcaaccaacaagcagctccagcacccagcacttctacctgaatttcaccatcaccaacctaccatattcccaggacaaagcccagccaggcaccaccaattaccagaggaacaaaaggaatattgaggatgcggtgagaagggggtgctcaaccaactcttccgaaacagcagcatcaagagttatttttctgactgtcaagtttcaacattcaggtctgtccccaacaggcaccacaccggggtggactccctgtgtaacttctcgccactggctcggagagtagacagagttgccatctatgaggaatttctgcggatgacccggaatggtacccagctgcagaacttcaccctggacaggagcagtgtccttgtggatgggtattctcccaacagaaatgagcccttaactgggaattctgaccttcccttctgggctgtcatcctcatcggcttggcaggactcctgggagtcatcacatgcctgatctgcggtgtcctggtgaccacccgccggcggaagaaggaaggagaatacaacgtccagcaacagtgcccaggctactaccagtcacacctagacctggaggatctgcaatgactggaacttgccggtgcctggggtgcctttcccccagccagggtccaaagaagcttggctggggcagaaataaaccatattggtcgg

SEQ ID NO: 7635 - DNA, 589 bp, Homo sapiens
ttccaagtggtcaacttgaccgatgctttggcaattgaaaaagggcagaaaggcgcgggctagtgggtggatggggacaaagatctaagtcaccttcttccagcgtgtgagcctgggaggagggtgggggtcctgaggagcaagaggtacgaggaaggaaaaggagagggcttctgggttagtttccacctcctgctttccaactcacggcgctttccttccggaaaggacgctggattcagggcgcgccagtacgcgcagtagcggcccgcgagtcggcaggcgcatgtttcctttcttgagcttcaacataaacggactcaatcccactgcccactacaatgtgttcgtagaggtggtgctggcggaccccaaccactggcgcttccaggggggcaaatgggtgacctgtggcaaagccgacaataacatgcagggcaacaaaatgtatgttcacccagagtctcctaatactggttcccactggatgagacaggagatttcattcgggaaattaaaactcaccaataacaaaggcgcaaataacaacaacacccagatgatagtcttacaatccttacacaaatac

SEQ ID NO: 7636 - DNA, 1992 bp, Homo sapiens
attgagatgcaaggtgtatttgttgttttttttttcctttgtatgacacttacggagagtactttagttcaaaaaaatgcttgccttcttctctttgtataatttacaacatggagtaaacatcttttctatgccttagtaccttgtcttgctcctttctaagtttggatcagcttccaatattttatcctttgagctttccatgacacaaaattcctccaagagttcctttaaagtgactttgtattctataatgtcccttcctctgggacatcttcatcctttttgtccccatgaccttccttatttatgctaatacatttgccttccctgagttcctctacactacctatctctcaaatggcagcagggtcaacatcaccatagtctgctattctttgataactccatttatgctgtctttgaagttcacttctggcattatcacttttcatttctttgctgcatttttatctttgttggccagttccctcttttcgtgatacattgttgtaaaatctcatgggagttagccacctggagacagggaggcaacagaactacacactttgctgtctgtgcataaattgaagagcagaagctcagtgaccaatcactgatggactttgaaaggagtgacagtaattggccctcaattatgatgcttatcttttatttatgtcgtgatttctagactgaagagttagcaacaaagtttataccatatgcaactactcgtgatcaatataccaaggtactgaaaaagaaccatgtcactgggctactagtgttatttaactgaatcatgcagagtgagggctgcctgtattcttgccttgttttctagaactgaagcatggagggtcaaataatgcatccaatgttatttagagctggaatttgaatccatgcagttgggtgcagagtctgagctcttaatcaccttgaccattacattaccttgctttttatttcctttggggaaatgtttcctaaaaaatgtaacgcccctctgtgctgctatgtgggaatcagaagtctcagtgcctgatcagacctccttgtccaggaacagacccttggggctgacccctccttgggacccaatgcccttctttctgcactatccaggtaccggggagaccaggatgccactatgtctatattggacatatccatgatgactggctttgctccagacacagatgacctgaagcagctggccaatggtgttgacagatacatctccaagtatgagctggacaaagccttctccgataggaacaccctcatcatctacctggacaaggtctcacactctgaggatgactgtctagctttcaaagttcaccaatactttaatgtagagcttatccagcctggagcagtcaaggtctacgcctattacaacctggaggaaagctgtacccggttctaccatccggaaaaggaggatggaaagctgaacaagctctgccgtgatgaactgtgccgctgtgctgaggagaattgcttcatacaaaagtcggatgacaaggtcaccctggaagaacggctggacaaggcctgtgagccaggagtggactatgtgtacaagacccgactggtcaaggttcagctgtccaatgactttgacgagtacatcatggccattgagcagaccatcaagtcaggctcggatgaggtgcaggttggacagcagcgcacgttcatcagccccatcaagtgcagagaagccctgaagctggaggagaagaaacactacctcatgtggggtctctcctccgatttctggggagagaagcccaacctcagctacatcatcgggaaggacacttgggtggagcactggcccgaggaggacgaatgccaagacgaagagaaccagaaacaatgccaggacctcggcgccttcaccgagagcatggttgtctttgggtgccccaactgaccacacccccattcccccactccagataaagcttcagttat

SEQ ID NO: 7637 - DNA, 584 bp, Homo sapiens
gtgtgtgcgcagggagagaacgccggccaccttcccgcttccgagctgggtgcgcgccgagcacaggagattgcctgcgtttaggaggtggctgcgttgtgggaaaagctatcaaggaagaaattgccaaaccatgtctttttttctgttttcagagttcacaacagatctgagtgttttaattaagcatggaatacagaaaacaacaaaaaacttaagctttaatttcatctggaattccacagttttcttagctccctggacccggttgacctgttggctcttcccgctggctgctctatcacgtggtgctctccgactactcaccccgagtgtaaagtcttgctgctctgttgcccaggctggagtacagtggcaggatctcagctcactgcaatctccgtctctcaggtttaagcagttctcctgcctcagcctcccaagtaggtgggactacagaaccttcggctcgcgtgcttctgagctgctgtggatggcctcggctctctggactgtccttccgagtaggatgtcactgagatccctcaaatggagcctcctgctgctgtcactcctgagtttct

SEQ ID NO: 7638 - DNA, 840 bp, Homo sapiens
atgaacagcacactgaggaggacacaaaagaagtagacagaatctctgcctctgcttaggagtatgcaatttagttggggcgacaaaacttaaatgctagaaccaataaaagaagattacaaagcaactcgcaaattctggacaatcaggaagtccaagccacaatgatcctgccaagaatcctccaggttaccttgaggatagttttgtaaaatctggagtcttcaatgtatcagaacttgtaagagtatccagaacgcccataacccagggaactggagtcaacttcccaattggagaaatcccaagccaaccatactatcatgacatgaactcgggggtcaatcttcagaggtctctgtcttctccaccaagcagcaaaagacccaaaactatatccatagatgaaaatatggaaccaagtcctacaggagacttttacccctctccaagttcaccagctgctggaagtcgaacatggcacgaaagagatcaagatatgtcttctccgactactatgaagaagcctgaaaagccattgttcagctctgcatctccacaggattcttccccaagactgagcactttcccccagcaccaccatcccggaatacctggagttgcacacagtgtcatctcaactcgaactccacctccaccttcaccgttgccatttccaacacaagctatccttcctccagccccatcgagctacttttctcatccaacaatcagatatcctccccacctgaatcctcaggatactctgaagaactatgtaccttcttatgacccatccagtccacaaaccagccagtcctggtacctgggctagcttgg

SEQ ID NO: 7639 - DNA, 922 bp, Homo sapiens; identical to SEQ ID NO: 6503

SEQ ID NO: 7640 - DNA, 1575 bp, Homo sapiens
ctgacggacagacagacagacaccgcccccagccccagctaccacctcctccccggccggcggcggacagtggacgcggcggcgagccgcgggcaggggccggagcccgcgcccggaggcggggtggagggggtcggggctcgcggcgtcgcactgaaacttttcgtccaacttctgggctgttctcgcttcggaggagccgtggtccgcgcgggggaagccgagccgagcggagccgcgagaagtgctagctcgggccgggaggagccgcagccggaggagggggaggaggaagaagagaaggaagaggagagggggccgcagtggcgactcggcgctcggaagccgggctcatggacgggtgaggcggcggtgtgcgcagacagtgctccagccgcgcgcgctccccaggccctggcccgggcctcgggccggggaggaagagtagctcgccgaggcgccgaggagagcgggccgccccacagcccgagccggagagggagcgcgagccgcgccggccccggtcgggcctccgaaaccatgaactttctgctgtcttgggtgcattggagccttgccttgctgctctacctccaccatgccaagtggtcccaggctgcacccatggcagaaggaggagggcagaatcatcacgaagtggtgaagttcatggatgtctatcagcgcagctactgccatccaatcgagaccctggtggacatcttccaggagtaccctgatgagatcgagtacatcttcaagccatcctgtgtgcccctgatgcgatgcgggggctgctgcaatgacgagggcctggagtgtgtgcccactgaggagtccaacatcaccatgcagattatgcggatcaaacctcaccaaggccagcacataggagagatgagcttcctacagcacaacaaatgtgaatgcagaccaaagaaagatagagcaagacaagaaaaaaaatcagttcgaggaaagggaaaggggcaaaaacgaaagcgcaagaaatcccggtataagtcctggagcgttccctgtgggccttgctcagagcggagaaagcatttgtttgtacaagatccgcagacgtgtaaatgttcctgcaaaaacacagactcgcgttgcaaggcgaggcagcttgagttaaacgaacgtacttgcagatgtgacaagccgaggcggtgagccgggcaggaggaaggagcctccctcagggtttcgggaaccagatctctcaccaggaaagactgatacagaacgatcgatacagaaaccacgctgccgccaccacaccatcaccatcgacagaacagtccttaatccagaaacctgaaatgaaggaagaggagactctgcgcagagcactttgggtccggagggcgagactccggcggaagcattcccgggcgggtgacccagcacggtccctcttggaattggattcgccattttatttttcttgctgctaaatcaccgagcccggaagattagagagttttatttctgggattcctgtagacacacccacccacatacatacatttatatatatatatattatatatatataaa

SEQ ID NO: 7641 - DNA, 1074 bp, Homo sapiens
ccatggcgggacacctggcttcggatttcgccttctcaccccctccaggcggtggaggtgatgggccaggggggccggagccgggctgggttgatcctcggacctggctaagcttccaaggccctcctggagggccaggaatcgggccggggtttgggccaggctctgaggagtgggggattcccccatgtcccccgccgtatgagttctgcggggggatggcgtactgtgggcctcagactggagtggggctagtgccccaagacggcttggagacctctcagcctgagggcgaagcaggagtcggggtggagagcaactccgatggggcctccccggagccctgcaccgtcccctctggtgccgtgaagctggagaaggagaagctggagcaaaacccggaggagtcccaggacatcaaagctctgcagaaagaactcgagcaatttgccaagctcctgaagcagaagaggatcaccctgggatatacacaggccgatgtggctcaccctgggggttctatttgggaaggtgttcagccaaacgaccatctgccgctttgaggctctgcagcttagcttcaagaacatgtgtgagctgcggcccttgctgcagaagtgggtggaggaagctgacaacaatgaaaatcttcaggagatatgcaaagcagaaaccctcgtgcaggcccgaaagagaaagcgaaccagtatcgagaaccaagtgagaggcaacctggagaatttgttcctgcggtgcccgaaacccacactgcagcagatcagccacatcgcccagcagcttgggctggagaaggatgtggtccgagtgtggttctgtaaccggcgccagaagggcaagcgatcaagcagtggctatgcacaacgagaggattttgaggctgttgggtctcctttctcagggggaccagtgtcctttcctctggccccagggccccattttggtaccccaggctatgggagccctcacttcactgcactgtactcctcggtccctttccctgagggggaagcctttccccctgtctccgtcaccactctgggctctcccatgcat

SEQ ID NO: 7642 - DNA, 2098 bp, Homo sapiens
aatctcagcatgggaacaagcctttgtgtcacactgtgcaaccttcctccctttcttaaatgcttggggcatttgtctggccttcccttttactgctggctgggaaggaggagcatcagaccacagatcctggaaggcacttctctccctgactgctgctcacactgccgtgagaacctgcttatatccaggaccaaggaggcaatgccaggaagctggtgaagggtttcctctcctccaccatggttgacagcactgagtatgaagtggcctcccagcctgaggtggaaacctcccctttgggtgatggggccagcccagggccggagcaggtgaagctgaagaaggagatctcactgcttaacggcgtgtgcctgattgtggggaacatgatcggctcgggcatctttgtttcccccaagggtgtgctcatatacagtgcctcctttggtctctctctggtcatctgggctgtcgggggcctcttctccgtctttggggccctttgttatgcggaactgggcaccaccattaagaaatctggggccagctatgcctatatcctggaggcctttggaggattccttgctttcatcagactctggacctccctgctcatcattgagcccaccagccaggccatcattgccatcacctttgccaactacatggtacagcctctcttcccgagctgcttcgccccttatgctgccagccgcctgctggctgctgcctgcatttgtctcttaaccttcattaactgtgcctatgtcaaatggggaaccctggtacaagatattttcacctatgctaaagtattggcactgatcgcggtcatcgttgcaggcattgttagacttggccagggagcctctactcattttgagaattcctttgagggttcatcatttgcagtgggtgacattgccctggcactgtactcagctctgttctcctactcaggctgggacaccctcaactatgtcactgaagagatcaagaatcctgagaggaacctgcccctctccattggcatctccatgcccattgtcaccatcatctatatcttgaccaatgtggcctattatactgtgctagacatgagagacatcttggccagtgatgctgttgctgtgacttttgcagatcagatatttggaatatttaactggataattccactgtcagttgcattatcctgttttggtggcctcaatgcctccattgtggctgcttctaggcttttctttgtgggctcaagagaaggccatctccctgatgccatctgcatgatccatgttgagcggttcacaccagtgccttctctgctcttcaatggtatcatggcattgatctacttgtgcgtggaagacatcttccagctcattaactactacagcttcagctactggttctttgtggggctttctattgtgggtcagctttatctgcgctggaaggagcctgatcgacctcgtcccctcaagctcagcgttttcttcccgattgtcttctgcctctgcaccatcttcctggtggctgttccactttacagtgatactatcaactccctcatcggcattgccattgccctctcaggcctgcccttttacttcctcatcatcagagtgccagaacataagcgaccgctttacctccgaaggatcgtggggtctgccacaaggtacctccaggtcctgtgtatgtcagttgctgcagaaatggatttggaagatggaggagagatgcccaagcaacgggatcccaaatctaactaaacaccatctggaatcctgatgtggaaagcaggggtttctggtctactggctagagctaaggaagttgaaaaggaaagctcacttctttggaggcacctgtccagaagcctggcctaggcagcttcaacctttgaacttactttttgaaatgaaaagtaatttatttgttttgctacatactgttccagacttttaaaggggacaatgaaggtgactgtggggaggagcatgtcaggtttgggcttggttgttttagaagcacctgggtgtgcctacctactcctcttttcttttaaaagggcccacaatgctccaatttc

SEQ ID NO: 7643 - DNA, 2945 bp, Homo sapiens
ctttcccagagagaaacttggcgatcacgttttcacatgatgctcacgctcagggcgcttcaattatccctccccacaaagataggtggcgcgtgtttcagggtctctcgtctctctcctacagaaaagaaaaagaaaaaaatgtcattagaagaggcgtaacacgtcagtccgtccccaggtttgtgtttcctggagtggccgaaagagatcagttctaacctgctctgcaggaataacggtcctgcctcccgacactcttggcgaggtttttgtacagtttgctccgggagctgtttcttcgcttccacctttttctcccccacacttcgcggcttcttcatgctttttcttctcaccatttctggccaaaactacaaacaagacttcgcagatcgagcctgcgtgctgccgaagcagggcgccgagtccatgcgaactgccatctgatccgctcttatcaatgaagcagccgatcatggcggatggcccccggtgcaagaggcgcaaacaagccaatcccaggaggaaaaacgccttggagtcagaaatgagcactcggagcgggagatgccctgctgctgcttgccaccggtgcggcccgtttgtaacttgcaaagtttgttgcttttgcccctgattcgggcagcgggtcctgggatgctcctgcttccctcctgcctcccacggagcccgggaagagggtctgcctccccatcccgccaccttccagcatcagcctctgaaaaatctcacagagacatgcacgttgtagcaaaaatcaaatccggaaactgcttgtttcagagaaagaaatgaagttgtcttttaaagaaaaactgaattaggaggagagaaaagggaaataggagaagaaaggaaaagttaaatttgatttttctccagagtttccactaaagggttggggacagtgtgaaggagaaggggagctttttacaaatgcctttggtctctgaacttcagtggcaaagaacagggatcaagttgaatgttctcagggctttggatcctagaggagaaacaatcagaagagcagaaatggttatccctgtttaaaataagccctcactctttaccacttccttaaaggagtggaggtgctggtagtgatggttagaggcaatgagggacggagaagttgctcccgtttcagagatgcttaaatgaaaaggaaagaaaatgcagtcaaccccttctccaggaggtgcctcctagctctcctccctgagaggtgaagttgggatggggcaacgagagtcatacacacttagacaaggaagtttccttcggatcactgtcagtccagacttggttatctttgcaaagtgtggaaatctttggcaagtagctttcttcgtaaagttgatgagcttctagggagcctgttttgctgactttcaaagcactggggcaggttgtgtggcaggtaccagttctgagggcgctccaaagatatccatctccatccttttttctctgtggagatcttctgcaagttttgtcacgctgcacacacacaaggctgggggctatgtatctaggctgatctatttgttttattttggtctggaaaaactaagccaattggggtagaaacatgctttccttcgtagcagagccagtaggctgctggtgtccatagagtgacagtccaccaggactaagggtgggctgaggattttaaactttacattgtttctctgttaccagatacaaataaattcacgtcttccaccatttgttttcaaatagggtaaaaccaagattaaagttccctgctcaactgctatgtcataggtttcagtgtttcccttccttcttaatttgcttaaagaaaattccaagaggttattaaagaccttgatgccatattaagaatatttcctgggaaaaatgtatgtctaccctgaaggtaggaaaggagggcgttgctagcctctagcagtgccgcgtttattctaagatgtgggagattcttttccttgcaacagtttttgtcatctgcattcttccaaggcttttaaggtgcattttcttctgtgtgaaaggaaattctttgtccttttcctctcagcaccgtggcttcccaaggtagacactattttgtgcctgtcacagagagagggagtgcaggtttgcaatgctcacagacaattgattgtctgccctaatgtgtttcatttacatgtttataacgtcaatggtgctggggtgtccactgtaccattcattcccgcattcccacaagggggcaattgtctgaatggccaagtcagacacctttttgattgctctttggttgtcttttcagagcaaagagataaaggaggaaaatctgtgatgcagaaacactagttgaaaatatacagaattaaatgtcaccacaaaagcagatgttaacataagcccaaatatgctttttagccaagatgtgaaggttgaaaaaaataattcagagcagagggaaggatgatttaaaccaataaatatagccctattccccctctttacttcttttctgtctttagcaatcagaagatgaaatgtaattttccttttcatttttaagccttgaaacatccaggcacctcctcattatttgtatgtttgctgtgatttgtgaattttgtatatatttacatagctctgtttatgccaacagcatcagcttaccacttggaaaatctattgaatgactatttgggctgtggggagggtaaacttttaaaaagtaagatccaagtatttcttcatcaagcagtttttaaaaggaaaacgataataatcagtaggctccatggaagcctttgccttaatagctatgtgccaaatacttttatcttgtgtgacagtcatgtcagagtgaaatctctcaggaaaagtgtaactagtagttacaaagtaaataaaggatttcattttaa

SEQ ID NO: 7644 - DNA, 594 bp, Homo sapiens
ccggtttgaaagggaagagacaggacctggtagggtttgagaacaggaatacacagaaggctcacctgttactcggcctcccagaaagatggataggagaaatgactacggatatagggtgcctctatttcagggccctctgcctcccccggggagcctggggcttcccttccctccagatatacagactgagaccacagaagaggacagtgtcctgctgatgcataccctgttggcggcaaccaaggactccctggccatggacccaccagttgtcaaccggcctaagaaaagcaagaccaagaaggcccctataaagactattactaaggctgcacctgctgcccctccagtcccagctgccaatgagattgccaccaacaagcccaaaataacttggcaggctttaaacctgccagtcattacccagatcagccaggctttacctaccactgaggtaaccaatactcaggcttcttcagtcactgctcagcctaagaaagccaacaagatgaagagagttactgccaaggcagcccaaggctcccaatccccaactggccatgagggtggcactatacagctgaagtcacc

SEQ ID NO: 7645 - DNA, 1895 bp, Homo sapiens
ttttttttcttccctctagtgggcggggcagaggagttagccaagatgtgactttgaaaccctcagcgtctcagtgcccttttgttctaaacaaagaattttgtaattggttctaccaaagaaggatataatgaagtcactatgggaaaagatggggaggagagttgtaggattctacattaattctcttgtgcccttagcccactacttcagaatttcctgaagaaagcaagcctgaattggttttttaaattgctttaaaaattttttttaactgggttaatgcttgctgaattggaagtgaatgtccattcctttgcctcttttgcagatatacacttcagataactacaccgaggaaatgggctcaggggactatgactccatgaaggaaccctgtttccgtgaagaaaatgctaatttcaataaaatcttcctgcccaccatctactccatcatcttcttaactggcattgtgggcaatggattggtcatcctggtcatgggttaccagaagaaactgagaagcatgacggacaagtacaggctgcacctgtcagtggccgacctcctctttgtcatcacgcttcccttctgggcagttgatgccgtggcaaactggtactttgggaacttcctatgcaaggcagtccatgtcatctacacagtcaacctctacagcagtgtcctcatcctggccttcatcagtctggaccgctacctggccatcgtccacgccaccaacagtcagaggccaaggaagctgttggctgaaaaggtggtctatgttggcgtctggatccctgccctcctgctgactattcccgacttcatctttgccaacgtcagtgaggcagatgacagatatatctgtgaccgcttctaccccaatgacttgtgggtggttgtgttccagtttcagcacatcatggttggccttatcctgcctggtattgtcatcctgtcctgctattgcattatcatctccaagctgtcacactccaagggccaccagaagcgcaaggccctcaagaccacagtcatcctcatcctggctttcttcgcctgttggctgccttactacattgggatcagcatcgactccttcatcctcctggaaatcatcaagcaagggtgtgagtttgagaacactgtgcacaagtggatttccatcaccgaggccctagctttcttccactgttgtctgaaccccatcctctatgctttccttggagccaaatttaaaacctctgcccagcacgcactcacctctgtgagcagagggtccagcctcaagatcctctccaaaggaaagcgaggtggacattcatctgtttccactgagtctgagtcttcaagttttcactccagctaacacagatgtaaaagacttttttttatacgataaataacttttttttaagttacacatttttcagatataaaagactgaccaatattgtacagtttttattgcttgttggatttttgtcttgtgtttctttagtttttgtgaagtttaattgacttatttatataaattttttttgtttcatattgatgtgtgtctaggcaggacctgtggccaagttcttagttgctgtatgtctcgtggtaggactgtagaaaagggaactgaacattccagagcgtgtagtgaatcacgtaaagctagaaatgatccccagctgtttatgcatagataatctctccattcccgtggaacgtttttcctgttcttaagacgtgattttgctgtagaagatggcacttataaccaaagcccaaagtggtatagaaatgctggtttttcagttttcaggagtgggttgatttcagcacctacagtgtacagtcttgtattaagttgttaataaaagtacatgttaaactta

SEQ ID NO: 7646 - DNA, 549 bp, Homo sapiens
aatatgaacgcttttttttctcatttgtcgtgtgctgtggaatttgatttctttacttttttggcattcattccctcattagacactgaaagagttttaccaggaagtgcagagctgtactgttgacttaggtattacagcagacagctccaaccacccagacaacaagcacaagaatcgatacataaatatcgttgcctatgatcatagcagggttaagctagcacagcttgctgaaaaggatggcaaactgactgattatatcaatgccaattatgttgatggctacaacagaccaaaagcttatattgctgcccaaggcccactgaaatccacagctgaagatttctggagaatgatatgggaacataatgtggaagttattgtcatgataacaaacctcgtggagaaaggaaggagaaaatgtgatcagtactggcctgccgatgggagtgaggagtacgggaactttctggtcactcagaagagtgtgcaagtgcttgcctattatactgtgaggaattttactctaagaaacacaaaaataaa

SEQ ID NO: 7647 - DNA, 3113 bp, Homo sapiens
gcgactgcgcgcgcagggcctgagcgggcgccggagggaaggggaagcggcggggtagtaacagattatgggcaacagtccttttaattaatctaccgtcatcatggctaatgaggactgtcccaaggctgctgatagtcctttttcatcagataaacatgcccaactcatcttggcccaaatcaataagatgagaaatggacagcatttctgtgatgtgcagctgcaagttggacaggaaagttttaaagctcatcggctggttttggctgccagcagtccttactttgcagctttgttcactggaggaatgaaagagtcctcaaaagatgttgtaccgattctaggaattgaagcaggaatctttcagatacttctagatttcatttacacaggtatagtgaacataggtgtgaataatgtccaggagttgattattgcagcagacatgctacagttgactgaagttgttcatctttgctgtgaatttctgaaaggacaaattgatccactgaactgcattggaatttttcagttctctgagcaaattgcctgccatgatctcttggaattctcagaaaactacattcatgtccatttcttggaggttcatagtggagaagagttcctggcacttacgaaagatcagctgatcaaaattttgcgaagtgaagagcttagcattgaggatgaataccaggtcttcttagctgcaatgcaatggattctgaaagatttgggaaaaagaagaaaacatgtggtggaagtgctagacccaattcgattccctttattacctcctcagagacttttaaagtatatagaaggagtatccgattttaatcttcgtgttgcattgcaaacacttctgaaagagtactgtgaagtatgcaaatctcccaaagagaacaagttttgtagttttctgcagacatctaaggttcgacctcggaagaaagcaagaaagtacctgtatgcagtaggtggatatactcggttgcaggggggtcgctggagtgatagcagagccctcagctgtgtagaacgttttgacacctttagccagtactggaccactgtgtcttcacttcatcaggctcgaagtgggctgggagtaacagttctgggagggatggtctacgctattggaggtgaaaaggattcaatgatttttgattgtactgaatgctatgatccagttactaaacagtggacaactgtagcttcgatgaatcatccccgctgcggcttaggagtgtgtgtgtgttatggggctatctatgctttgggtggatgggttggagctgagatagggaacaccattgaacgatttgatcctgatgaaaataaatgggaagtagttggtaacatggctgtgtcacgctactactttgggtgctgtgaaatgcaaggtttaatttatgtaattgggggcatcagcaatgaaggaatagaacttcgttcttttgaagtctatgatccactttctaagcgttggtctccacttcctccaatgggaaccaggagagcatatcttggtgtggctgcactcaatgactgcatctattctgttggaggatggaatgagacccaagatgctcttcatactgtagaaaaatattcctttgaagaggaaaagtgggttgaagttgcctcaatgaaagtgcctagagcaggcatgtgtgttgtggcagtcaatggtcttctgtatgtttctggaggtcgatcttccagccatgattttttggctccaggtaccttggactcagttgaagtttataaccctcattcagatacatggacagaaattggtaacatgatcaccagtcgttgtgaagggggcgttgctgtgctatgaaatataaagcataacagagcacaaggaacattttgaaaatgcaggacctgaccttttgcaaagcaaacatagatttggtgataagaccctctgattctgtgagttttccatgtatttggtagataaatgactaacgaggctgggcgcagtggcctcatgcctataatcccagcactttggaaggctgaggcagaaggatcacttgagcccaggaatttgaggttgtagtaagctacgatcatgccactgcactccactctgggcaacagaatgagatcctgtctcttaaagaaaaaaaataaactcaagaatgatttttctaaaaatatgagtgagaatggatatggaatatatcccaattaataaagagctcacacagatttgccaggtttactaataatagaaatgccatttatgctgtagaattctccagtttaagtgtagacaactcctattttacaaatttgtagaaattatttactagaagcttcctggcaaatagtccctttagctacttctccagtgcagtataaattgtaacataaaactttatgtgatataggaatagtgtcaatgacacagtttaaagacctctatattcacaattatatccagagcataattttccatggccatagtttgagccacagagaaagccaatgaaatagattcctacttttatttaatgccaagagttttcactagccccaaactttttattggcagcagatatcctaggaggggtgtttgggaaatatctagctattttaatagatagatacctttttgcttgatgataagtttttgcttgctcatattttttgtcttgatcctgagaatgcaagtaaggaattaataggaggttcttagtgaccagatgttgtaatgggctatacagtccagcaggcagtatgcacctagaaatttctcccttttttaggctgggcatggtggctcacacctgtaatcccagcactttgagaggccgaggtgagacgggaagatggcttgaactcaggagttcgagactagcctgggcaacgtgatgagactccgtctctaccaaaaaatatataaaaattagccgggcgttgtggcttgtacctgtggtcccatctgcttgggaggctgaggttgcaggatcacttgagcccaggaggtcaaggctgcagtgagccaagattgtgccactgcacaccggcctgggtgacagcatgagaacctgtctcaaaaaaaaaaaaaaaaaaagaaaaaa

SEQ ID NO: 7648 - DNA, 1169 bp, Homo sapiens
ttttcttttattcttgtctgttctgcctcactcccgagctctactgactcccaacagagcgcccaagaagaaaatggccataagtggagtccctgtgctaggatttttcatcatagctgtgctgatgagcgctcaggaatcatgggctatcaaagaagaacatgtgatcatccaggccgagttctatctgaatcctgaccaatcaggcgagtttatgtttgactttgatggtgatgagattttccatgtggatatggcaaagaaggagacggtctggcggcttgaagaatttggacgatttgccagctttgaggctcaaggtgcattggccaacatagctgtggacaaagccaacctggaaatcatgacaaagcgctccaactatactccgatcaccaatgacaagttcaccccaccagtggtcaatgtcacgtggcttcgaaatggaaaacctgtcaccacaggagtgtcagagacagtcttcctgcccagggaagaccaccttttccgcaagttccactatctccccttcctgccctcaactgaggacgtttacgactgcagggtggagcactggggcttggatgagcctcttctcaagcactgggagtttgatgctccaagccctctcccagagactacagagaacgtggtgtgtgccctgggcctgactgtgggtctggtgggcatcattattgggaccatcttcatcatcaagggattgcgcaaaagcaatgcagcagaacgcagggggcctctgtaaggcacatggaggtgatggtgtttcttagagagaagatcactgaagaaacttctgctttaatggctttacaaagctggcaatattacaatccttgacctcagtgaaagcagtcatcttcagcattttccagccctatagccaccccaagtgtggatatgcctcttcgattgctccgtactctaacatctagctggcttccctgtctattgccttttcctgtatctattttcctctatttcctatcattttattatcaccatgcaatgcctctggaataaaacatacaggagtctgtctctgctatggaatgccccatggggcatctcttgtgtacttattgtttaaggtttcctcaaactgtgatttttctgaacacaataaactattttgatgatcttgggtggaa

SEQ ID NO: 7649 - DNA, 804 bp, Homo sapiens
atcccaggtttacaaccaggcactgactacaagatctacctgtacaccttgaatgacaatgctcggagctcccctgtggtcatcgacgcctccactgccattgatgcaccatccaacctgcgtttcctggccaccacacccaattccttgctggtatcatggcagccgccacgtgccaggattaccggctacatcatcaagtatgagaagcctgggtctcctcccagagaagtggtccctcggccccgccctggtgtcacagaggctactattactggcctggaaccgggaaccgaatatacaatttatgtcattgccctgaagaataatcagaagagcgagcccctgattggaaggaaaaagacagttcaaaagacccctttcgtcacccaccctgggtatgacactggaaatggtattcagcttcctggcacttctggtcagcaacccagtgttgggcaacaaatgatctttgaggaacatggttttaggcggaccacaccgcccacaacggccacccccataaggcataggccaagaccatacccgccgaatgtaggtgaggaaatccaaattggtcacatccccagggaagatgtagactatcacctgtacccacacggtccgggactcaatccaaatgcctctacaggacaagaagctctctctcagacaaccatctcatgggccccattccaggacacttctgagtacatcatttcatgtcatcctgttggcactgatgaagaacccttacaggtaattaattgttctcttcacttctcatggggcagcacagaaagg

SEQ ID NO: 7650 - DNA, 1267 bp, Homo sapiens
ggggagcagaaggccgcgggcgggcggctggcgcgctgtgtacttaggtcgtgtgctggggcttttctctcccaggagccggcggggggaggggagggggaggggccaccgctccgccttctccttttcgcaatgttgacgcaatctataaatagtggaacaaaaggaccaacttcctcggagctttgctgaaactgcacaaaaaatcgagccggggggttccctggtccccggcgatggggcggggagcgctgcgccgggggagggggcgggcgcggcggcgcgggccccgccgaggggggacacctggctgaggcacagctgccgccgtgcctttccgcgcgagcccagagctccgatccctgcgcgggctcgagagctcgccccgaacgggggtcttcctcctccgccgttgacaggttttgacctgtagcagagaaccaattctggagaacagcctcacttctttgattgaatacttacataatgcattggaacatgacatgagattaaggtttaataatgatagaatgaagaccacaataaaagagacctctacttagctcagcaattcttacctttcttacctatttgatgaagatgtcttttgaaaggtgtactgcaaggaacaaaatgtttgtaaattctccttttaccaaggtggataattactgtaccttcctcatggaaaaagttttatttaaagtgttatttctcattgaatactatcaaaaaggaaaaaaaaatgacctaaacttttgagatagatttggctctaggcctactctaggtgcggtacttcactatagtttataaaagatggtccctgtcagcaaagaactgtaacctgtatgagaatattatactaacatacaagaaacaagtagagaataatggaatgtaaactctggcttgctaacttaagtgtggtagaagcttgaaggaaatgtggacttaaacttatcagagaagacttataagaggatatgaaaggtgtaaattttgataccaccattgccgccttcccctcaaaaaaggtgagaactgactaaactactggtacttagaccatgtggagaaggaactgaaaatggaaacagaaacacgtctgtacagagcagagtgtcagataatagctcattttagtagagggcaataaatgccacatgagatgatcacctcagcagaaaactgtaagtaactggggacttacaggagaattgaacagttgtttctgctgactcagtaaaaagtcttcattttataa

SEQ ID NO: 7651 - DNA, 620 bp, Homo sapiens
ctgggtgtacagcgtcctcgaaaccacgagcaagtgagcagatcctccgaggcaccagggactccagcccatgccatggcggattctgagcgcctctcggctcctggctgctgggccgcctgcaccaacttctcgcgcactcgaaagggaatcctcctgtttgctgagattatattatgcctggtgatcctgatctgcttcagtgcctccacaccaggctactcctccctgtcggtgattgagatgatccttgctgctattttctttgttgtctacatgtgtgacctgcacaccaagataccattcatcaactggccctggagtgatttcttccgaaccctcatagcggcaatcctctacctgatcacctccattgttgtccttgttgagagaggaaaccactccaaaatcgtcgcaggggtaaaggccatgggagcagctctgaagcacagagcgaagggtttgaggagccagggaccatttctgcctttgcttctggcagaaatcgtgtgacccacagcaagtcacacttgtcctcagacatggaggaaagtctggcccaggacttggttttgcctcccaaggtcttcatttgctgtgaagggaagtcccttgtcaga

SEQ ID NO: 7652 - DNA, 3776 bp, Homo sapiens
gccaggagagctctcatttcctcccagcctcgtgcgggaaatggctttaattctgacggcagggctgtgagggactagcgggaacccgagccttttgtcaaggaactgcggcgtcggtggccagtcatccccgccgccgcggagccgctgcactgctgggggatctcccagcagctctgacgagcgcgggctgcagcatgggcagaaaacgctgccctgcagattagctgggtggattttttaagcgcaccccaccccccaaacccataaaataacaaaaccaacccgcagtggccgaccggagatagctaagatgccgcgcaggagtttccacctggatgtttgaggttgtgtagatgtggccggcacccttgagagtggagctagggggtgcagactgagcagtgaacagaaggagccttggacagggctgggccagcctcccgagttccaggagcgaattgcaaacccaccgggaaaatgagcgaagagacggtccccgaggctgcctcgccgccgcccccgcaggggcagccttactttgaccgcttctcagaggacgaccccgagtacatgcgccttcgcaaccgggcggcggacctgcggcaggacttcaacctgatggagcagaagaagcgcgtcaccatgatcctgcagagtccctctttcagggaggagctggaaggcctcatccaggagcagatgaagaaggggaacaactcctccaacatctgggccctgcgacagatcgcggacttcatggccagcacctcccacgcagtcttcccgacatcttccatgaatgtctccatgatgacgcctatcaatgacctccacacagctgactccctgaacctggccaaaggggagcggctcatgcggtgcaagatcagcagtgtctaccgactcctggacctctatggctgggcccagctgagtgacacctatgtcacgttgagagtcagcaaggagcaggaccacttcctgatcagccctaagggagtttcttgcagtgaagtcacagcgtccagcctgatcaaggtgaacattctgggagaggtggtggagaagggcagcagctgcttcccagtggacaccacaggcttctgtctgcactcggccatctatgcagcgaggcccgacgtgcgctgcatcatccacctgcacacaccggccacagcagcggtgtcggccatgaagtggggcctcctgcctgtctcccacaatgccctgctggtgggggacatggcctattatgacttcaatggggaaatggagcaggaagccgatcggatcaacctgcagaagtgccttggacccacctgcaagatcctggtgctaagaaaccatggagtggttgctctgggtgacacggtagaggaggcattttacaagatcttccacctgcaggctgcatgtgagatacaggtgtcggctctgtccagtgccgggggagtggagaacctcatcctcctggagcaggagaagcaccggccccatgaggtgggctccgtgcagtgggccgggagcacctttgggcctatgcagaagagtcggctgggggagcatgagtttgaggccctcatgaggatgctggacaacctgggctacagaacaggttacacgtatcgccacccctttgttcaagagaaaaccaaacacaaaagtgaggtggagattccagccacggtcacagccttcgtgtttgaggaggacggtgccccggtgcccgccctgcgacagcatgcccagaagcagcagaaggagaagacccgctggctcaatacgcccaacacctacctgcgggtcaatgtggccgatgaggtccagaggagcatgggcagcccccgacccaagaccacgtggatgaaggctgacgaggtggagaaatccagcagtggcatgccgattcgcatcgaaaacccaaaccaatttgtgcctctctatactgacccccaggaagtactggagatgaggaacaagattcgagaacaaaaccgacaagatgtgaagtcagcggggcctcagtcccagctcctggcgagcgtcattgccgagaagagccgaagcccggtagagcagaggctgcccctgactggcggggaaacgtgtttgccttcggggtcttctgtgcctggggctgggttgcaggacccctgagtcctcatacccaccttcccctgtgatcttgggtgccggtgctcttgctgcaaaatggaggccaacctcacaggggtgctgtgaggaccagggaggacaatgtctgatggcccctgtgggcactgggctggagaacagcagcccagcctgcctgcaggagtgatgcggccggcttccgtacctcctgccatggaactccactctgtcctcccttactaccccgtgaagtggggactcataggcttggggctggagactcccaggtgccccaggtgtgcccagccctgagagtctctgacctctgagcctggtatgacatcatccaaccagagctctggaaagatgatcatgtacccatagagaaggggtatatagacaggacccatgctcctacaggatgggaagggacaatattacccacacaaacccacattgagttagaaagtattgtaattgtttttgtgcttgagatagaacagtgttttgtctagtgcttagcaaaaggggtgaagttcagaattctggcatgtgtttgaaatcactgctgctccttgcaaggtagcaatgggcatgacattttccttagcagtaaaaattggggaaatacaggaaatgttcctctctgcagggcaaattgtgatgatgcaatgatttcaggtcaagactgcagcccacagggtgggtgcccattggcaggagaagtgtgaaagttgtatcatcacacttacctccccccaaccccaactcagccaagatggggaacactgaatatcccgcagggtcaagtatagaaatagccatgttctggcgggaggtgagagttcattacaatgagcaacactgttaaaaaaacaaacaaaaatctcccctgccatttataccaagtgctcttctcggagtccctcttcttgggtttttggtcttggattctcggttgactccatgattccctacattaggcctactgtggcctcccttttggaaggggcccaggggcagaagacctggcgggccagggcagggaggactggcagcctccaggctcacctccctttggcttcactctctttgctcctcagcttcagagcactgcatcctcaaaggccaagatgaggatgctgaattaggaaaaaaggctgtggagtctgaattttagttcctatcttgggctagaggggtcaaagaattcctgaagcttatgtaagggccggctggtcagctccctagaaccacgggctccacagaggtggcaaaacccagtgattttgccagtatccctgcagggacctgcggtacaggcaggttgaagatctgagactcaggaaccttggcccctttgtcacttacaactgtgtgtgaaacaggactaacagtttggactgagagcactgaagctgctgtgtgttgtgcatataacttaatgctgtgtgttgtggcttgcactgctgtgggggcggggagggcagtggtggggaatggctggcatgaagcttgcttgagccaatgctatgcttgctgggctttggctgactggctttgggccaccaactgtatttgcatagtgatggcttggaagtgtccatagaagggattgcaataaaggtgtgtcttccttc

SEQ ID NO: 7653 - DNA, 356 bp, Homo sapiens
tttccggtacacgcggggaaatcgcctcctgccagtgtctgatcgctcgcctccgcctccgcctctgccgcctggattgcattattatttttatccgggttgccgtttgctgcggatggtgcattactctactgactggcagagacaggagaggtagatgtccacgcccacagaccctggtgcgatgccccacccagggccttcgccggggcctgggccttcccctgggccaattcttgggcctagtccaggaccaggaccatccccaggttccgtccacagcatgatggggccaagtcctggacctccaagtgtctcccatcctatgccgacgatggggtccacagacttcccac

SEQ ID NO: 7654 - DNA, 4298 bp, Homo sapiens
ccgtgggacgggcggaggcgcccgagtcccgcttccccggcgcccttccaccccgagcccgactcagcccgcggccacctgcgccccgcccctgtcggccgcgcccgagcccagcgccgcgagccgctccccggcgggctggctcctggccccggaagcgcgagcgttcacttagcggcgagtggctccgtctccgcggacagagcgcgcgccccctggcccggcccgcgaggggctcccggcgcggtccccgagcatttcccgccgggtggagcgggccgagcccggcaggatgaccagccccgcggccgctcaaagccgggagatcgactgtttgagcccggaagcgcagaagctggcggaagcccggctcgctgcaaaacgggcggcccgcgcggaggctcgcgagatccgcatgaaggagctggagcggcagcagaaggaggtgacttctgcccaagagaaatattatgggctggatacaaaatggggtgacatcgagcagtggatggaagacagtgagcgctactctcgtagatccagaagaaacacatcggcttctgatgaagacgagcgcatgtcagtgggtagtcgtggaagcctgaggtcgcagcctgacttggagtatgggggtccttacgcctggacaaatggttatgatggagaattgtatggatcacagtccctgaatagaagatctggcaggccctcctgtctgtacagcgctgcccggccttcggggagttaccgggcgtctgtgttggatgaaggcagcttcggtgggacccgacggggcagcacctccggctcccgtgctccctcggagtacagcggccacctcaactccagctcccgcgcctcctccagggccagctcggcccgggccagccctgtggtagaagagagaccagaaaaagattttactgagaaggggtctcgtaacatgccgggcctgtctgcagccacgctggcctctctgggtgggacttcctctcggagaggcagcggagacacctccatctccatcgacaccgaggcatccatcagggaaatcaaggaactcaatgagttaaaggaccagattcaggatgtagaaggcaaatacatgcagggattgaaagagatgaaggactctctagcagaagttgaagagaaatataagaaggctatggtttccaatgctcagctagacaatgaaaagacaaacttcatgtaccaggttgataccctaaaagatatgttgctggagcttgaagaacagctggctgaatctaggcggcagtacgaagagaaaaacaaagaatttgaaagggaaaaacacgcccacagtatactgcaatttcagtttgctgaagtcaaggaggccctgaagcaaagagaggaaatgctcgaggaaatccgacagctacagcagaaacaggcgagttctatcagggagatttctgatcttcaggaaacaatagagtggaaagacaaaaagataggggcattagagaggcagaaagagttctttgattccgtaaggagtgaacgggatgatcttagagaagaagtagtcatgctgaaagaggaattaaagaaacatggaataatcctaaattcagaaatagctaccaatggagagacttccgacaccctcaataatgttggataccaaggtcctaccaagatgacaaaagaagagttaaatgccctcaagtcgacaggggatgggaccctagatattaggttgaaaaagctggttgatgaacgggaatgcttattggaacagattaagaaactcaaagggcagctggaggagagacagaagattggcaaactagacaatcttcgatctgaagatgatgtcttggaaaacgggacagacatgcatgtaatggacctacaaagggatgccaacagacagatcagcgacctcaaatttaaacttgcaaaatctgagcaagagataactgcattagaacaaaatgtaataaggttagagagtcaagtatcacgttacaaatcagcggctgaaaatgcagaaaaaatagaagatgaacttaaggcagaaaaacggaaactccaaagagagctccgctctgcattggataaaacagaagagctcgaggtgagcaacggccacttagtgaagcgtctggaaaaaatgaaagcaaatcggagtgcactcttgtcccagcagtaaattccagctctgatcaggcaactggttggtgactggagagcattgtttcataggcttttctctgtcctatctgggagcgctgcttcttcccctgccttccgagagacgaagaccgtggcgagcttggcgcttaggggctcccgtgccatggctcaccccagggagccccagcagccaccaggtgcctctgtctgcagacccctggcccgggctggcgccgacgctcagaacctgcaggtacttcataagcacacaggggcctcgagggagctctgtgtctgaccgcacagcagcctctgaatgccgctggaagtgatgatcaaagtaaagattcagttgggacttgagttttttttttttttcatgtgtcttgctgaagattaaggggaaatgttacagtgttgggacttcctttcatggcagaatctacaatttgagcgacttcagtagtatctcttagtctacgcttttcatacacaaaacactgtggaaccacaagccattaccaagcaaaactctttcactggaaacaagggggcagtctagaagtaaaagtgaccttaagaagactctttacaggcaacaaatgaagcttttctaagggatttttgcatcagttcagtcataagaatacttttttccagggtaattaggcaatagcttcactgaaaatgacagcttttcattgcattatttaatccttatatttggaattgaagtcgttaacttcttttaaagaatgtactattagaaaaattaaaaatgaaatgttgagagacttcagcaatgtggttctaatttttttccactgagaaagaagatctttaatttcatattaatggttctgtatattttgggtcatctttttattttttaagaatatcaagtcaattcatttttctttccctatttaaaaaaaaaggtgttttcacagaatgagtgcacttaaaaagtgaagtgaaggaggaggtaacagtagagacgatggcaatatcatcaaggacaaaagtaaaaacgtttagctacctgctgatttttagtgactgttcatatatgttgtatttcaagtatggctggtgaagccagtcagcttttcgggacgttagcaagtggaaactgagtcagtatcatccaaaaccatatctagtcttaacacatggagaatgctggagtgagggttgtgagttcagggtatataatcaagaaaacactcccagcataatgctaggggtcaccagtgtccatcccccagaactgtatggatctaggatatacacagctgcgttgcattaagaaagagatgaaatctctattaaaatacacaagatttttgtatctccttgtgcagaggatatttgccactgcccattgggaagcagacaagttatagggggctgggggccaacactggcaagtaggaaaccacgggtcggacaggtgagcaaaatgtgctggcaggtgggcaccactgggagacccacactgcacacccgggcaccgtatgaacaggaaagaggaaggaagctggacgaagcccctcagggaccctgtgctgaccatgctgggcccaccggcaaaagggagatattcagttccttgtctcatccttaaggtttcttccacaacatctgaatacaagcatgtttaactgggaaaatgtctatgtcatgcgtgaataacaccagcagcaaacactcacacatcacgcagacacggccggcagcatgctgacgcttttaggtatttttcactcatgcaattttcacatattttcactcatttcatttgcacggaaattctatgaggtagatgctgttatcaaatccacattacagatgagggacccagggtccaggaaggtgaactggcagaagtctcccagctggtagaacagggctgcaaggcatcgattcccaggtgtctcacagccctgagaagatggcgttttccctatcagtggctctgaggaagtcaagccttcagtctctacctctcccaccaattcttttggaaacagcaaaccaatgttacacacacttcctaatccagaggaagctagaacacgatttttaaatttatttagtaaaataaaactttttttgcagatgtaacg

SEQ ID NO: 7655 - DNA, 1603 bp, Homo sapiens
accccctgcttggttgcaccctcagatagtacccatgagcttcactgttcagcctcggggcccaggcgcttcctggaatctctccttggccggggttaaaatgcagttcccgctcaaaatgcttataggttgatagaagtccagatcctgaggaaatctccagctaaatgctcaaaatataaaatactgagctgagatttgcgaagagcagcagcatggatggattttatgaccagcaagtgccttacatggtcaccaatagtcagcgtgggagaaattgtaacgagaaaccaacaaatgtcaggaaaagaaaattcattaacagagatctggctcatgattcagaagaactctttcaagatctaagtcaattacaggaaacatggcttgcagaagtggcttttcatggcctgccactgaaaatcaagaaagaaccccacagtccatgttcagaaatcagctctgcctgcagtcaagaacagccctttaaattcagctatggagaaaagtgcctgtacaatgtcagtgcctatgatcagaagccacaagtgggaatgaggccctccaacccccccacaccatccagcacgccagtgtccccactgcatcatgcatctccaaactcaactcatacaccgaaacctgaccgggccttcccagctcacctccctccatcgcagtccataccagatagcagctaccccatggaccacagatttcgccgccagctttctgaaccctgtaactcctttcctcctttgccgacgatgccaagggaaggacgtcctatgtaccaacgccagatgtctgagccaaacatccccttcccaccacaaggctttaagcaggagtaccacgacccagtgtatgaacacaacaccatggttggcagtgcggccagccaaagctttccccctcctctgatgattaaacaggaacccagagattttgcatatgactcagaagtgcctagctgccactccatttatatgaggcaagaaggcttcctggctcatcccagcagaacagaaggctgtatgtttgaaaagggccccaggcagttttatgatgacacctgtgttgtcccagaaaaattcgatggagacatcaaacaagagccaggaatgtatcgggaaggacccacataccaacggcgaggatcacttcagctctggcagtttttggtagctcttctggatgacccttcaaattctcattttattgcctggactggtcgaggcatggaatttaaactgattgagcctgaagaggtggcccgacgttggggcattcagaaaaacaggccagctatgaactatgataaacttagccgttcactccgctattactatgagaaaggaattatgcaaaaggtggctggagagagatatgtctacaagtttgtgtgtgatccagaagcccttttctccatggcctttccagataatcagcgtccactgctgaagacagacatggaacgtcacatcaacgaggaggacacagtgcctctttctcactttgatgagagcatggcctacatgccggaagggggctgctgcaacccccacccctacaacgaaggctacgtgtattaacacaagtg

SEQ ID NO: 7656 - DNA, 2140 bp, Homo sapiens
attggatcaaacatgtcacaagagtcggacaagtaagtggatcacacgcgccggctgctgctactactaccactttgggctgatggcaactgtaataaaagactagtggccttagtgcccatgcccagtgaccctccattcaatacccgaagagcctacaccagtgaggatgaagcctggaagtcatacttggagaatcccctgacagcagccaccaaggccatgatgagcattaatggtgatgaggacagtgctgctgccctcggcctgctctatgactactacaaggttcctcgagacaagaggctgctgtctgtaagcaaagcaagtgacagccaagaagaccaggagaaaagaaactgccttggcaccagtgaagcccagagtaatttgagtggaggagaaaaccgagtgcaagtcctaaagactgttccagtgaacctttccctaaatcaagatcacctggagaattccaagcgggaacagtacagcatcagcttccccgagagctctgccatcatcccggtgtcgggaatcacggtggtgaaagctgaagatttcacaccagttttcatggccccacctgtgcactatccccggggagatggggaagagcaacgagtggttatctttgaacagactcagtatgacgtgccctcgctggccacccacagcgcctatctcaaagacgaccagcgcagcactccggacagcacatacagcgagagcttcaaggacgcagccacagagaaatttcggagtgcttcagttggggctgaggagtacatgtatgatcagacatcaagtggcacatttcagtacaccctggaagccaccaaatctctccgtcagaagcagggggagggccccatgacctacctcaacaaaggacagttctatgccataacactcagcgagaccggagacaacaaatgcttccgacaccccatcagcaaagtcaggagtgtggtgatggtggtcttcagtgaagacaaaaacagagatgaacagctcaaatactggaaatactggcactctcggcagcatacggcgaagcagagggtccttgacattgccgattacaaggagagctttaatacgattggaaacattgaagagattgcatataatgctgtttcctttacctgggacgtgaatgaagaggcgaagattttcatcaccgtgaattgcttgagcacagatttctcctcccaaaaaggggtgaaaggacttcctttgatgattcagattgacacatacagttataacaatcgtagcaataaacccattcatagagcttattgccagatcaaggtcttctgtgacaaaggagcagaaagaaaaatccgagatgaagagcggaagcagaacaggaagaaagggaaaggccaggcctcccaaactcaatgcaacagctcctctgatgggaagttggctgccatacctttacagaagaagagtgacatcacctacttcaaaaccatgcctgatctccactcacagccagttctcttcatacctgatgttcactttgcaaacctgcagaggaccggacaggtgtattacaacacggatgatgaacgagaaggtggcagtgtccttgttaaacggatgttccggcccatggaagaggagtttggtccagtgccttcaaagcagatgaaagaagaagggacaaagcgagtgctcttgtacgtgaggaaggagactgacgatgtgttcgatgcattgatgttgaagtctcccacagtgaagggcctgatggaagcgatatctgagaaatatgggctgcccgtggagaagatagcaaagctttacaagaaaagcaaaaaaggcatcttggtgaacatggatgacaacatcatcgagcactactcgaacgaggacaccttcatcctcaacatggagagcatggtggagggcttcaaggtcacgctcatggaaatctagccctgggtttggcatccgctttggctggagctctcagtgcgttcctccctgagagagacagaagccccagccccagaacctggagacccatctcccccatctcacaactgctgttacaagaccgtgctggggagtggggcaagggacaggccccactgtcggtgtgcttggcccatccactggcacctac

SEQ ID NO: 7657 - DNA, 9657 bp, Homo sapiens; identical to SEQ ID NO: 665

SEQ ID NO: 7658 - DNA, 593 bp, Homo sapiens
gtttattccgcggtttccccgcggctgcccccgggagaccgaagaggtggctggggcaggccgaaagcagaggaaaggttgggcagtgtcacccttgcacacccacaggtctgattggcaccggctcccattccggctccagcctccaatccgacccccatttcggctgcagcctcggacctagctccggccctcggtctatccggttgcatcctccctccctgttccggatcttatcttgcgccagcgcctactccaggatcccgtagccagacctcaagccatggctggtcccttctcccgtctgctgtccgcccgcccgggactcaggctcctggctttggccggagcggggtctctagccgctgggtttctgctccgaccggaacctgtacgagctgccagtgaacgacggaggctgtatcccccgagcgctgagtacccagacctccgaaagcacaacaactgcatggccagtcacctgaccccagcagtctatgcacggctctgcgacaagaccacacccactggttggacgctagatcagtgtatccagactggcgtggacaaccctggccaccccttcatcaaga

SEQ ID NO: 7659 - DNA, 2801 bp, Homo sapiens
accttgcggccgaccccgctcccccgcctcctcgggagagataaatgctgactccgctcggaaagttctcaactgcaaagtttgctgtccggctgcctagggtctgggaagctcgggcaccctccctctccggggctcctgctcccacccctccggcccccccaccgtcgcgctcctccaggctgggcctgtggccgcggtgctttttaattttcccccagctcagaatcttgctgctcggcccccaggagagcaacaactcaacgggaacgatgtggaaggtgtcagctctgctcttcgttttgggaagcgcgtcgctctgggtcctggcagaaggagccagcacaggccagccagaagatgacactgagactacaggtttggaaggcggcgttgccatgccaggtgccgaagatgatgtggtgactccaggaaccagcgaagaccgctataagtctggcttgacaactctggtggcaacaagtgtcaacagtgtaacaggcattcgcatcgaggatctgccaacttcagaaagcacagtccacgcgcaagaacaaagtccaagcgccacagcctcaaacgtggccaccagtcactccacggagaaagtggatggagacacacagacaacagttgagaaagatggtttgtcaacagtgaccctggttggaatcatagttggggtcttactagccatcggcttcattggtgcaatcatcgttgtggttatgcgaaaaatgtcgggaaggccctaaagagctgaagggttacgccctgctgccaacgtgcttaaaaaaagaccgtttctgactctgtgccctgtccctgagctcgtgggagaagatgacccgtggaacacttgcctggcccactcagaatccacggtgacctctccgcttgccaaaataaccgaaggaaagaccgttcaccagacttggctcctctaaacatttgctgttcaaacatgtttttgaatatacattctataaaagattatttgaaagacaaaattcatagaaaatggagcaaaactgtataaactgatttgtaactaacactggaccattggatcgatattatatgctgtaaccatgtgtctccgtctgaccattcttgttattgttaaaatgcagaggaatctggaaatatttatatccacggagtccttggatccagtgctacgtcagtaaatagcaccagcattttgcaattgctgatctgctgaaatgtacacattctggtctagtttggtctatcttttaaagcctgatctggtgtgaataatcaactaggaaatctaaacttggataacacgtggtgaacaactgcctttagctggtccagattaatcatttcaaagacatccattttagatcacaagcaggaagtcgatagtctcaaaggcactttgtttctcccaagtaggccaccaggcagcctctagagttgctttacccaaatccttctccagccatgacttggtgactctaagcttgctcccacctgccccctccacttccctcagatgatgaggagccagggctaagggggcagccttctctcttcccagtgatgcacatccttcacattggctgctttgttctggaatatggatatctcagcctggatgccgaggaagctgctggatgcttaatggtgctagaggctcaagtgtgtttgaaaccaagagccagttgtcccccatgcagaaagaaatcctgtgtgagcctctggtatgagaaataaaatctgccagttttataacattcactttctgcctctgaggaaagatacagggaacaaaaatcaatttgtacagtcttaatattaaaagcagcttgactaaatacctgatttaaaaatagaagacatccccagtcctcatgacataccgcaaatatctgtggggtcctgttgaaaagaacaaaataaaggagcccaaggggtcattctgtctcagcaccatccagcctggcacttctcttcccatatatccattggatttttttttttttttcctaaacaaagtttttacactgagcagatgctctgtcatgatggcggttgtgcaattctggtatcctctaaatttgtaagcattcataaaacaggaaaaagtaaactatcattcggaagcacagcccattcctcccattttttgcaatgatgtctggatgttattttaaacagtgtgtctgtgtgttcccaaatccagctggccccaccagctcagattccattttttttgtgtgtgtgtgtgaaacgtagtctgcaactctgcctcccggcaattatacatgtgtcaggatgtcaaaaagcaattctcctgcctcagcctcctgagtagctgggactacaggttcctaccaccacacccggccaatttttgtatttttagtagagatggggtttcaccgtatcggcgaggatgatctctatctcttgacctcgtgatctgcccgcctcggcctcccaaagtgctgggattacaggcgtgtgccactgcgctcggcctcagattccatatttgaacaccagctgattgagagaaggggaatgagaagagctggatgagtttaaataactcattgttcagattcctgaacaggagttgggataatggccatcttttctttcctatcctttcttcccccctcactgtgaaaaataacagtccaccccaagtcatacactggacccagtgcctgcggggacaggactgtgggtttcttggtcacacctgtgttggtgctcaatgcagtgtagacatgttttcaaataaaacaaatgattgtgtacaa

SEQ ID NO: 7660 - DNA, 3044 bp, Homo sapiens
aacttaaccggagcgtgcacacccgcctgcgaggctgacccgagcgcgtcccacccaaggtcgcccagccccgcgggcgtttacttttcaaagggagggataggagaagaaaggtgctgatcgtggtaggcggtgctgtggcgactcggaacggcatgggagccctgggcgtttcgggatcttcctctcctgggggatgtcctgggtggcggcgccttcctgccgccgttaacacaaacccggtggacttcgctccaggtgtaattactcaagcctccaggatggcaatccagttccgttcgctcttccccttggcattgcctgggatgctggcgctcctcggctggtggtggtttttctctcgtaaaaaaggccatgtcagcagccatgatgagcagcaggtggaggctggtgctgtgcagctgagggctgaccctgccatcaaggaacctctccccgtggaagacgtctgtcccaaagtagtgtccacaccccccagtgtcacagagcctccagaaaaggaactgtccaccgtgagcaagctgcctgcagagcccccagcattgctccagacacacccaccttgccgaagatcagagtcctcgggcattcttcctaacaccacagacatgagattgcgaccaggaacacgcagagatgacagtacaaagctggagctagccctgacaggtggtgaagccaaatcgattcctctagagtgccccctttcatccccaaagggtgtactattctccagcaaatcagctgaggtgtgtaagcaagattcccccttcagcagggtgccaaggaaggtccagccaggctaccccgtagtccccgcagagaagcgtagctctggggagagggcaagagagacaggtggggccgaagggactggtgatgccgtgttgggggaaaaggtgcttgaagaagctctgttgtctcgggagcatgtcttggaattggagaacagcaagggccccagcctggcctctttagagggggaagaagataaggggaagagcagctcatcccaggtggtggggccagtgcaggaggaagagtatgtagcagagaagttgccaagtaggttcatcgagtcggctcacacagagctggcaaaggacgatgcggcgccagcacccccagtcgcagacgccaaagcccaggatagaggtgtcgagggagaactgggcaatgaggagagcttggatagaaatgaggagggcttggatagaaatgaggagggcttggatagaaatgaggagagcttggatagaaatgaggagggcttggatagaaatgaggagattaagcgggctgccttccagataatctcccaagtgatctcagaagcaaccgaacaggtgctggccaccacggttggcaaggttgcaggtcgtgtgtgtcaggccagtcagctccaagggcagaaggaagagagctgtgtcccagttcaccagaaaactgtcttgggcccagacactgcggagcctgccacagcagaggcagctgttgccccgccggatgctggcctccccttgccaggcctaccagcagagggctcaccaccaccaaagacctacgtgagctgcctgaagagccttctgtccagccccaccaaggacagtaagccaaatatctctgcacaccacatctccctggcctcctgcctggcactgaccacccccagtgaagagttgccggaccgggcaggcatcctggtggaagatgccacctgtgtcacctgcatgtcagacagcagccaaagtgtccctttggtggcttctccaggacactgctcagattctttcagcacttcagggcttgaagactcttgcacagagaccagctcgagccccagggacaaggccatcaccccgccactgccagaaagtactgtgcccttcagcaatggggtgctgaagggggagttgtcagacttgggggctgaggatggatggaccatggatgcggaagcagatcattcaggaggttctgacaggaacagcatggattccgtggatagctgttgcagtctcaagaagactgagagcttccaaaatgcccaggcaggctccaaccctaagaaggtcgacctcatcatctgggagatcgaggtgccaaagcacttagtcggtcggctaattggcaagcaggggcgctatgtgagttttctgaagcaaacatctggtgccaagatctacatttcaaccctgccttacacccagagcgtccagatctgccacatagaaggctctcaacatcatgtagacaaagcgctgaacttgattgggaagaagttcaaagagctgaacctcaccaatatctacgctcccccattgccttcactggcactgccttctctgccgatgacatcctggctcatgctgcctgatggcatcaccgtggaggtcattgtggtcaaccaggtcaatgccgggcacctgttcgtgcagcagcacacacaccctaccttccacgcgctgcgcagcctcgaccagcagatgtacctctgttactctcagcctggaatccccaccttgcccaccccagtggaaataacggtcatctgtgccgcccctggtgcggacggggcctggtggcgagcccaagtggttgcctcctacgaggagaccaacgaagtggagattcgatacgtggactacggcggatataagagggtgaaagtagacgtgctccggcaaatcaggtctgactttgtcaccctgccgtttcagggagcagaagtccttctggacagtgtgatgcccctgtcagacgatgaccagttttcaccggaagcagatgccgccatgagcgagatgacggggaatacagcactgcttgctcaggtgacaagttacagtccaactggtcttcctctgattcagctgtggagtgtggttggagatgaagtggtgttgataaaccggtccctggtggagcgaggccttgcccagtgggtagacagctactacacaagcctttgacccccatgctgcttcctgagagtctttttttgcactgttgaaattgggctt

SEQ ID NO: 7661 - DNA, 641 bp, Homo sapiens
acaccgcttacaggcaaatacccctctaggcggcacagcctgatctctctccgcttcttgtgttagtccggcaggacggcggctggagccactggtcaccttggtcttcatgctctgtgacctgtggagttggcaatatcacacgcatccgtctctgcaactccccagtgccccagatggggggcaagaattgcaaagggagtggccgggagaccaaagcctgccagggcgccccatgcccaatcgatggccgctggagcccctggtccccgtggtcggcctgcactgtcacctgtgccggtgggatccgggagcgcacccgggtctgcaacagccctgagcctcagtacggagggaaggcctgcgtgggggatgtgcaggagcgtcagatgtgcaacaagaggagctgccccgtgggtgagtgaggggtagaagcgggggcactgaaacccgggcttccattctgatgaaaagcacaaacgctttgggaaactagatgaaaaacacagaaaagaaaaatcaattttagttgcacacgcaaagataactacttttaacatctgtgtttcagtcctcctgtatttctaatgtaaaaacaaaaaagatgccaggtggcgtggcctgtggaatgtgggtagttg

SEQ ID NO: 7662 - DNA, 1153 bp, Homo sapiens; identical to SEQ ID NO: 6923

SEQ ID NO: 7663 - DNA, 888 bp, Homo sapiens
gagtcagtgtcagcccgaaggctgaaggaaaaagagcaacagatccagggagcattcacctgccctgtctccaaacagagccaccaaggaggagcaggggagcgacggccggggcagaagttgagaccacccagcagaggagctaggccagtccatctgcatttgtcacccaagaactcttaccatgaagaccctcctactgttggcagtgatcatgatctttggcctactgcaggcccatgggaatttggtgaatttccacagaatgatcaagttgacgacaggaaaggaagccgcactcagttatggcttctacggctgccactgtggcgtgggtggcagaggatcccccaaggatgcaacggatcgctgctgtgtcactcatgactgttgctacaaacgtctggagaaacgtggatgtggcaccaaatttctgagctacaagtttagcaactcggggagcagaatcacctgtgcaaaacaggactcctgcagaagtcaactgtgtgagtgtgataaggctgctgccacctgttttgctagaaacaagacgacctacaataaaaagtaccagtactattccaataaacactgcagagggagcacccctcgttgctgagtcccctcttccctggaaaccttccacccagtgctgaatttccctctctcataccctccctccctaccctaaccaagttccttggccatgcagaaagcatccctcacccatcctagaggccaggcaggagcccttctatacccacccagaatgagacatccagcagatttccagccttctactgctctcctccacctcaactccgtgcttaaccaaagaagctgtactccggggggtctcttctgaataaagcaattagcaaatcatgt

SEQ ID NO: 7664 - DNA, 957 bp, Homo sapiens
atgaacacccgcaatagagtggtgaactccgggctcggcgcctcccctgcctcccgcccgacccgggatccccaggacccttctgggcggcaaggggagctgagccccgtggaagaccagagagagggtttggaggcagcccctaagggcccttcgcgggagagcgtcgtgcacgcgggccagaggcgcacaagtgcatacaccttgatagcaccaaatataaaccggagaaatgagatacaaagaattgcggagcaggagctggccaacctggagaagtggaaggagcagaacagagctaaaccggttcacctggtgcccagacggctaggtggaagccagtcagaaactgaagtcagacagaaacaacaactccagctgatgcaatctaaatacaagcaaaagctaaaaagagaagaatctgtaagaatcaagaaggaagctgaagaagctgaactccaaaaaatgaaggcaattcagagagagaagagcaataaactggaggagaaaaaaagacttcaagaaaaccttagaagagaagcatttagagagcatcagcaatacaaaaccgctgagttcttgagcaaactgaacacagaatcgccagacagaagtgcctgtcaaagtgctgtttgtggcccacaatcctcaacatggaaacttcctatcctgcctagggatcacagctgggccagaagctgggcttacagagattctctaaaggcagaagaaaacagaaaattgcaaaagatgaaggatgaacaacatcaaaagagtgaattactggaactgaaacggcagcagcaagagcaagaaagagccaaaatccaccagactgaacacaggagggtaaataatgcttttctggaccgactccaaggcaaaagtcaaccaggtggcctcgagcaatctggaggctgttggaatatgaatagcggtaacagctggggtatatga

SEQ ID NO: 7665 - DNA, 3288 bp, Homo sapiens
ctttgtagctcctggagattcaattctttcttgccagggtctttctacctctgcctcacatattccctccatctcttcattccacttccctcatccccaccccccactcccctccatcctcaatacacaaatgctcctaggcaccctccttctgatcctgtacatcttaatgttgtgccggatgtttcttctcgtgggagctcccaaagcaaacaccacccagcctgggattgtggaaggagggcaggtcctcaaatgtgactggtcttctacccgccggtgccagccaattgaatttgatgcaacaggcaatagagattatgccaaggatgatccattggaatttaagtcccatcagtggtttggagcatctgtgaggtcgaaacaggataaaattttggcctgtgccccattgtaccattggagaactgagatgaaacaggagcgagagcctgttggaacatgctttcttcaagatggaacaaagactgttgagtatgctccatgtagatcacaagatattgatgctgatggacagggattttgtcaaggaggattcagcattgattttactaaagctgacagagtacttcttggtggtcctggtagcttttattggcaaggtcagcttatttcggatcaagtggcagaaatcgtatctaaatacgaccccaatgtttacagcatcaagtataataaccaattagcaactcggactgcacaagctatttttgatgacagctatttgggttattctgtggctgtcggagatttcaatggtgatggcatagatgactttgtttcaggagttccaagagcagcaaggactttgggaatggtttatatttatgatgggaagaacatgtcctccttatacaattttactggcgagcagatggctgcatatttcggattttctgtagctgccactgacattaatggagatgattatgcagatgtgtttattggagcacctctcttcatggatcgtggctctgatggcaaactccaagaggtggggcaggtctcagtgtctctacagagagcttcaggagacttccagacgacaaagctgaatggatttgaggtctttgcacggtttggcagtgccatagctcctttgggagatctggaccaggatggtttcaatgatattgcaattgctgctccatatgggggtgaagataaaaaaggaattgtttatatcttcaatggaagatcaacaggcttgaacgcagtcccatctcaaatccttgaagggcagtgggctgctcgaagcatgccaccaagctttggctattcaatgaaaggagccacagatatagacaaaaatggatatccagacttaattgtaggagcttttggtgtagatcgagctatcttatacagggccagaccagttatcactgtaaatgctggtcttgaagtgtaccctagcattttaaatcaagacaataaaacctgctcactgcctggaacagctctcaaagtttcctgttttaatgttaggttctgcttaaaggcagatggcaaaggagtacttcccaggaaacttaatttccaggtggaacttcttttggataaactcaagcaaaagggagcaattcgacgagcactgtttctctacagcaggtccccaagtcactccaagaacatgactatttcaagggggggactgatgcagtgtgaggaattgatagcgtatctgcgggatgaatctgaatttagagacaaactcactccaattactatttttatggaatatcggttggattatagaacagctgctgatacaacaggcttgcaacccattcttaaccagttcacgcctgctaacattagtcgacaggctcacattctacttgactgtggtgaagacaatgtctgtaaacccaagctggaagtttctgtagatagtgatcaaaagaagatctatattggggatgacaaccctctgacattgattgttaaggctcagaatcaaggagaaggtgcctacgaagctgagctcatcgtttccattccactgcaggctgatttcatcggggttgtccgaaacaatgaagccttagcaagactttcctgtgcatttaagacagaaaaccaaactcgccaggtggtatgtgaccttggaaacccaatgaaggctggaactcaactcttagctggtcttcgtttcagtgtgcaccagcagtcagagatggatacttctgtgaaatttgacttacaaatccaaagctcaaatctatttgacaaagtaagcccagttgtatctcacaaagttgatcttgctgttttagctgcagttgagataagaggagtctcgagtcctgatcatgtctttcttccgattccaaactgggagcacaaggagaaccctgagactgaagaagatgttgggccagttgttcagcacatctatgagctgagaaacaatggtccaagttcattcagcaaggcaatgctccatcttcagtggccttacaaatataataataacactctgttgtatatccttcattatgatattgatggaccaatgaactgcacttcagatatggagatcaaccctttgagaattaagatctcatctttgcaaacaactgaaaagaatgacacggttgccgggcaaggtgagcgggaccatctcatcactaagcgggatcttgccctcagtgaaggagatattcacactttgggttgtggagttgctcagtgcttgaagattgtctgccaagttgggagattagacagaggaaagagtgcaatcttgtacgtaaagtcattactgtggactgagacttttatgaataaagaaaatcagaatcattcctattctctgaagtcgtctgcttcatttaatgtcatagagtttccttataagaatcttccaattgaggatatcaccaactccacattggttaccactaatgtcacctggggcattcagccagcgcccatgcctgtgcctgtgtgggtgatcattttagcagttctagcaggattgttgctactggctgttttggtatttgtaatgtacaggatgggcttttttaaacgggtccggccacctcaagaagaacaagaaagggagcagcttcaacctcatgaaaatggtgaaggaaactcagaaacttaactgcagtttttaagttatgctacatcttgacccactagaattagcaactttattatagatttaaactttcttcatgaggagtaaaaatccaaggctttactgctgatagtgctaattggcattaaccacaaaatgagaattatatttgt

SEQ ID NO: 7666 - DNA, 366 bp, Homo sapiens; identical to SEQ ID NO: 84

SEQ ID NO: 7667 - DNA, 1123 bp, Homo sapiens; identical to SEQ ID NO: 6694

SEQ ID NO: 7668 - DNA, 1465 bp, Homo sapiens
gctggtaactccttccccagagtctgattacctgctccgcgaggccgcggacacgtgcggagagccgactgacactcgcagccccctcgggaggcccgacgcgactgggcccctcaggtgcaatgattctggactgagacgcgcttgggcagaggctatgtaatcgtgtctgtgttgaggacttcgcttcgaggagggaagaggagggatcggctcgctcctccggcggcggcggcggcggcgactctgcaggcggagtttcgcggcggcggcaccagggttacgccagccccgcggggaggtctctccatccagcttctgcagcggcgaaagccccagcgcccgagcgcctgagccggcggggagcaagtaaagctagaccgatctccggggagccccggagtaggcgagcggcggccgccagctagttgagcgcaccccccgcccgccccagcggcgccgcggcgggcggcgtccaggcggcatggagaaggacggcctgtgccgcgctgaccagcagtacgaatgcgtggcggagatcggggagggcgcctatgggaaggtgttcaaggcccgcgacttgaagaacggaggccgtttcgtggcgttgaagcgcgtgcgggtgcagaccggcgaggagggcatgccgctctccaccatccgcgaggtggcggtgctgaggcacctggagaccttcgagcaccccaacgtggtcaggttgtttgatgtgtgcacagtgtcacgaacagacagagaaaccaaactaactttagtgtttgaacatgtcgatcaagacttgaccacttacttggataaagttccagagcctggagtgcccactgaaaccataaaggatatgatgtttcagcttctccgaggtctggactttcttcattcacaccgagtagtgcatcgcgatctaaaaccacagaacattctggtgaccagcagcggacaaataaaactcgctgacttcggccttgcccgcatctatagtttccagatggctctaacctcagtggtcgtcacgctgtggtacagagcacccgaagtcttgctccagtccagctacgccacccccgtggatctctggagtgttggctgcatatttgcagaaatgtttcgtagaaagcctctttttcgtggaagttcagatgttgatcaactaggaaaaatcttggacgtgattggactcccaggagaagaagactggcctagagatgttgcccttcccaggcaggcttttcattcaaaatctgcccaaccaattgagaagtttgtaacagatatcgatgaactaggcaaagacctacttctgaagtgtttgacatttaacccagccaaaagaatatctgcctacagtgccctgtctcacccatacttccaggacctggaaaggtgcaaagaaaacctggattcccacctgccgcccagccagaacacctcggagctgaatacagcctga

SEQ ID NO: 7669 - DNA, 571 bp, Homo sapiens
gcggcgtcgatgctcaagaaaccagaaactcggcttgaggagttgctgcttttttgtcggaaggtcttcaaatgagagtaaagcgttaagagcctcactcctgagtctttttttttttttaagataaaaactatactagagtccagcgacttcttaccactctgaataaatgttgctgaagtgctgctgaaagggccagagatgcaaggatttgggatacattttgaacctttaagctgtctgacattgacctcctttcattattaataaagaagaatcaggagcttaggatgtattaacaccaactcattaatatactaaccggacaatgttctacaaacaattctacattgtaaaggactggattggcacaaaataaaataattttattttattcagcttataatatgactcgatggaggaaaatttgataagcatgagagaagaccattcttttcatgttcgttacagaatggaagcttcttgcctagagctggccttggaaggggaacgtctatgtaaatcaggagactgccgcgctggcgtgtcattctttgaagctgcagttcaa

SEQ ID NO: 7670 - DNA, 1124 bp, Homo sapiens; identical to SEQ ID NO: 6440

SEQ ID NO: 7671 - DNA, 892 bp, Homo sapiens
ttgaactcttgggctcaagcaatccacccacatcagcctcccaaagtgctgggattgcagggatgagccactgtgcctggccgaacttctttcgtttattcaaatgtttattgatctacgacatgcgagatttgtgcaggctctttgctggtttcaccctctcaatcgctgtgtgagtttgtgtctttagggaaagtgaggcccaggaagggaagtgagttgcttagcgacacactgtcaggaaaaggggccctgagttgagcttaggtaaaaagcctcagagctgttgccctgacatctgtcttttttctctccctgcttcccaccccacctgtgcccccagtcagactcagtcacatgcccactcgaagtcgcactgctatggaaagtgggtgcaggtggtgggcaccctggcgtgatccgcctgcttgactggtttgagacacaggagggcttcatgctggtcctcgagcggcctttgcccgcccaggatctctttgactatatcacagagaagggcccactgggtgaaggcccaagccgctgcttctttggccaagtagtggcagccatccagcactgccattcccgtggagttgtccatcgtgacatcaaggatgagaacatcctgatagacctacgccgtggctgtgccaaactcattgattttggttctggtgccctgcttcatgatgaaccctacactgactttgatgggacaagggtgtacagccccccagagtggatctctcgacaccagtaccatgcactcccggccactgtctggtcactgggcatcctcctctatgacatggtgtgtggggacattccctttgagagggaccaggagattctggaagctgagctccacttcccagcccatgtctcccca

SEQ ID NO: 7672 - DNA, 3025 bp, Homo sapiens
agacgcgcgggcgcgggggacggcgcaggggccgcctggctggagcagccagaggggatagcttcgtcgagaacggaggacaccggcggtccagggtcctgggcagtcgcgccagagctgagcggagggcgcggcgcgagaacgaatctttgtgacattctctctcagcattctttatcccctgtttgctgaagacttcgacaaaagctggtcttagctgttggcattctcctgagaaaaggatagcttcagaaatcagaaaaacatttgggaggtgtctagcccagtggaccttctgaagagcaatgctaagaagacgtttggtttaaagaattaaaaggaagaacaacttaagagcttcttcaaagtttcccgcatgaaaattacttaaacgttgcacacaacgtttcacaaaatcttttgtgaaagaagaaaaggaaattcagtgtgtgagtctcagcaggagttaagctaatgcagcttaaaataatgccgaaaaagaagcgcttatctgcgggcagagtgcccctgattctcttcctgtgccagatgattagtgcactggaagtacctcttgatctggtacagcctccaaccatcacccaacagtctccaaaagattacattattgaccctcgggagaatattgtaatccagtgtgaagccaaagggaaaccgcccccaagcttttcctggacccgtaatgggactcattttgacatcgataaagaccctctggtcaccatgaagcctggcacaggaacgctcataattaacatcatgagcgaagggaaagctgagacctatgaaggagtctatcagtgtacagcaaggaacgaacgcggagctgcagtttctaataacattgttgtccgcccatccagatcaccattgtggaccaaagaaaaacttgaaccaatcacacttcaaagtggtcagtctttagtacttccctgcagacccccaattggattaccaccacctataatattttggatggataattcctttcaaagacttccacaaagtgagagagtttctcaaggtttgaatggggacctttatttttccaatgtcctcccagaggacacccgcgaagactatatctgttatgctagatttaatcatactcaaaccatacagcagaagcaacctatttctgtgaaggtgatttcagtggatgaattgaatgacactatagctgctaatttgagtgacactgagttttatggtgctaaatcaagtagagagaggccaccaacatttttaactccagaaggcaatgcaagtaacaaagaggaattaagaggaaatgtgctttcactggagtgcattgcagaaggactgcctaccccaattatttactgggcaaaggaagatggaatgctacccaaaaacaggacagtttataagaactttgagaaaaccttgcagatcattcatgtttcagaagcagactctggaaattaccaatgtatagcaaaaaacgcattaggagccatccaccataccatttctgttagagttaaagcggctccatactggatcacagcccctcaaaatcttgtgctgtccccaggagaggatgggaccttgatctgcagagctaatggcaaccccaaacccagaattagctggttaacaaatggagtcccaatagaaattgcccctgatgaccccagcagaaaaatagatggcgataccattattttttcaaatgttcaagaaagatcaagtgcagtctatcagtgcaatgcctctaatgaatatggatatttactggcaaacgcatttgtaaatgtgctggctgagccaccacgaatcctcacacctgcaaacacactctaccaggtcattgcaaacaggcctgctttactagactgtgccttctttgggtctcctctcccaaccatcgagtggtttaaaggagctaaaggaagtgctcttcatgaagatatttatgttttacatgaaaatggaactttggaaattcctgtggcccaaaaggacagtacaggaacttatacgtgtgttgcaaggaataaattagggatggcgaagaatgaagttcacttagaaatcaaagatcctacatggatcgttaaacagcccgaatatgcagttgtgcaaagagggagcatggtgtcctttgaatgcaaagtgaaacatgatcacaccttatccctcactgtcctgtggctgaaggacaacagggaactgcccagtgatgaaaggttcactgttgacaaggatcatctagtggtagctgatgtcagtgacgatgacagcgggacctacacgtgtgtggccaacaccactctggacagcgtctccgccagcgctgtgcttagcgttgttgatgtcccaaatcctccctttgacttagaactgacagatcaacttgacaaaagtgttcagctgtcatggaccccaggcgatgacaacaatagccccattacaaaattcatcatcgaatatgaagatgcaatgcacaagccagggctgtggcaccaccaaactgaagtttctggaacacagaccacagcccagctgaagctgtctccttacgtgaactactccttccgcgtgatggcagtgaacagcattgggaagagcttgcccagcgaggcgtctgagcagtatttgacgaaagcctcagaaccagataaaaaccccacagctgtggaaggactgggatcagagcctgataatttggtgattacgtggaagcccttgaatggtttcgaatctaatgggccaggccttcagacaagtactgcctctttttaaaatattaggtttgagtccatctaaaggcaaagtcattatgtgttttgagaggatggttttattaaatataaatgtaaatgacaagagagaaaaaggaagagaataactaaatgggtgcctgtcacaggtttgtactaatgtattttcagctgaatcaggaatgagttactgaaactcaaaaccttgaatcgtgcgagcacggtgaaatgtcaatttaatacatgttgaaacattc

SEQ ID NO: 7673 - DNA, 2258 bp, Homo sapiens
actcggtgtcaccacaggaggagactcaggcaggccgcgctccagcctcaccaggctccccggctcgccgtggctctctgagcccccttttcagggaccccagtcgctggaacatttgcccagactcgtaccaaacttttccgccctgggctcgggatcctggactccggggcctccccgtcctcccctttcccgggttccagctccggcctctggactaggaaccgacagcccccctccccgcgtccctccctctctctccagccgttttggggaggggctctccacgctccggatagttcccgagggtcatccgcgccgcactcgcctttccgtttcgccttcacctggatataatttccgagcgaagctgcccccaggatgaccacgctggccggcgctgtgcccaggatgatgcggccgggcccggggcagaactacccgcgtagcgggttcccgctggaagtgtccactcccctcggccagggccgcgtcaaccagctcggcggtgtttttatcaacggcaggccgctgcccaaccacatccgccacaagatcgtggagatggcccaccacggcatccggccctgcgtcatctcgcgccagctgcgcgtgtcccacggctgcgtctccaagatcctgtgcaggtaccaggagactggctccatacgtcctggtgccatcggcggcagcaagcccaagcaggtgacaacgcctgacgtggagaagaaaattgaggaatacaaaagagagaacccgggcatgttcagctgggaaatccgagacaaattactcaaggacgcggtctgtgatcgaaacaccgtgccgtcagtgagttccatcagccgcatcctgagaagtaaattcgggaaaggtgaagaggaggaggccgacttggagaggaaggaggcagaggaaagcgagaagaaggccaaacacagcatcgacggcatcctgagcgagcgagcctcagcaccccaatcagatgaaggctctgatattgactctgaaccagatttaccactaaagaggaaacagcgcagaagccgaaccaccttcacagcagaacagctggaggaactggagcgtgcttttgagagaactcattaccctgacatttatactagggaggaactggcccagagggcgaagctcaccgaggcccgagtacaggtctggtttagcaaccgccgtgcaagatggaggaagcaagctggggccaatcaactgatggctttcaaccatctcattcccggggggttccctcccactgccatgccgaccttgccaacgtaccagctgtcggagacctcttaccagcccacatctattccacaagctgtgtcagatcccagcagcaccgttcacagacctcaaccgcttcctccaagcactgtacaccaaagcacgattccttccaacccagacagcagctctgcctactgcctccccagcaccaggcatggattttccagctatacagacagctttgtgcctccgtcggggccctccaaccccatgaaccccaccattggcaatggcctctcacctcaggtaatgggactcctgaccaaccacggtggggtacctcatcagccccagactgattacgcgctctcccctctcaccgggggtctggaacctaccaccacggtgtcggccagctgcagtcagagactagaccatatgaagagcttggacagtctgccaacatctcagtcctactgtccacccacctatagcaccacaggctacagtatggaccctgtcacaggctaccaatatgggcagtatggacaaagtgcctttcattatctcaagccagatatcgcgtaagtgaactgtccacttggagctaaaactggccctgtttctggtcttcgcagcctagatatgaagaatctgctctgaaaacaaaaaaaaattacccttttgttggggggggtggggcagtggtcccaataggagacaaaggagagtgattgattttcttcctccaatagttggtttcaaatccttttgaacacgttcgacaaaagcagtggagaagaggaagacctggagcaataaaagacaaatgcaacattttaaggcaatggtttcacatggttacatatcaaaacatcccaattctttagtgctgatcatcgaggagctagaacattccatttgcttgtgtgcgtgcgtgcgtgtgtgtgtgtgtgtgtgtattgagatttacccagactggtttgggcaagcagactgttctaaaatat

SEQ ID NO: 7674 - DNA, 712 bp, Homo sapiens
ggcggcggcggcggagagagctggctcagggcgtccgctaggctcggacgacctgctgagcctcccaaaccgcttccataaggctttgcctttccaacttcagctacagtgttagctaagtttggaaagaaggaaaaaagaaaatccctgggccccttttcttttgttctttgccaaagtcgtcgttgtagtctttttgcccaaggctgttgtgtttttagaggtgctatctccagttccttgcactcctgttaacaagcacctcagcgagagcagcagcagcgatagcagccgcagaagagccagcggggtcgcctagtgtcatgaccagggcgggagatcacaaccgccagagaggatgctgtggatccttggccgactacctgacctctgcaaaattccttctctaccttggtcattctctctctacttgggttaggaggtcagatttgccagaaaaccagtggcaccgtggttgttccaggaggatattttgtcatgttcattaaaagtcccacaagaaaggtgacacatgcttatcccaactttacaggagatcggatgtggcactttgcggtgtctgtgtttctggtagagctctatggaaacagcctccttttgacagcagtctacgggctggtggtggcagggtctgttctggtcctgggagccatcatcggtgactgggtggacaagaatgctagacttaaag

SEQ ID NO: 7675 - DNA, 583 bp, Homo sapiens
gccacccgctgcctgcaggaagacgcccggtcccgggccgggttagccccatgggaacggggttcggtccgagcccggtgggaggctcccggagcgcagcctgggcccagcccaccccgcgccggcggccatggcaggcaccctggacctggacaagggctgcacggtggaggagctgctccgcgggtgcatcgaagccttcgatgactccgggaaggtgcgggacccgcagctggtgcgcatgttcctcatgatgcacccctggtacatcccctcctctcagctggcggccaagctgctccacatctaccaacaatcccggaaggacaactccaattccctgcaggtgaaaacgtgccacctggtcaggtactggatctccgccttcccagcggagtttgacttgaacccggagttggctgagcagatcaaggagctgaaggctctgctagaccaagaagggaaccgacggcacagcagcctaatcgacatagacagcgtgtgcgtggggggagcacagagggctgggggggcactcagtatcctataccatctgtgcttaataaatgtctgttgaactgaa

SEQ ID NO: 7676 - DNA, 710 bp, Homo sapiens
ccccaaacctgccaccgacggccacttccgtttccccgatagtatttggggatctcgaagcgatacttccggctccccccaggtccccaagctttacttttgtggggcacgacgagaaagtccgcagccccaaacattcccagaggtccacttgggccagtggtactttatcgcaggggcagctcccaccaaggaggagttggcaacttttgaccctgtggacaacattgtcttcaatatggctgctggctctgccccgatgcagctccaccttcgtgctaccatccgcatgaaagatgggctctgtgtgccccggaaatggatctaccacctgactgaagggagcacagatctcagaactgaaggccgccctgacatgaagactgagctcttttccagctcatgcccaggtggaatcatgctgaatgagacaggccagggttaccagcgctttctcctctacaatcgctcaccacatcctcccgaaaagtgtgtggaggaattcaagtccctgacttcctgcctggactccaaagccttcttattgactcctaggaatcaagaggcctgtgagctgtccaataactgacctgtaacttcatctaagtccccagatgggtacaatgggagctgagttgttggagggagaagctggagacttccagctccagctcccactcaagataataaagataatttttcaatcctca

SEQ ID NO: 7677 - DNA, 1961 bp, Homo sapiens
ccatcatctgcaaatagcataagcagcagcacatcttcaaatcatagcggccacactccagagcccccactcccaccggttggaggtgacctcgccagccgactgtccagtgatgaaggggagatggacggagccgacgaatccgagaagctagactgtcagttctccacgcaccaccccagacctctggcgttttgctcatttgggagtcgcctcatgggacgagggtactatgtgtttgatagaagatgggatcgttttcgattcgcactaaactccatggtagaaaaacacctgaattcacagatgtggaagcacagaaacccgagccacagggcatcaggtccctcccccctgttcaggacttgcctaaccaatctgctgtcactgagcaacattggggctgcctgggtgtcaactctggagagcgtagcaccccgctaccctctcaacctcgctgcccaaaccccaggccccggcgggcccgaacctggagggatggcagccgatgggggcgtggaagacattaggaagaaaaggaacggccaagactcttttttctttaacaagcatttaactctgcatcaggagccgccaacacagtattctctttcagccaggaagatccctcctgcggcagatagccccctgccctcgccagcagcccacatcaccacccccgttccagcatccgttttgcagcctttcagcaaccccagtgctgtgtatcttccttcagctcccatcagctcgaggctcacctcttcttacataatgacatcagccatgctctcaaacgcagctttcgtgacatcgccggacccgagcgccctcatgtcccacaccacagctttccctcatgtggccgcaaccctcagcatcatggactcaaccttcaaggccccatccgccgtgtccccgataccagccgtcatcccttccccatcccacaagccatccaaaaccaaaaccagcaaatcctcaaaagtcaaagacctgtccacccgtagcgacgagtctccaagtaacaaaaaaaggaagccacagtcttcgacttcctcctcctcctcctcctcctcctcttccttgcagacatccctctcgtctccactgtcagggcctcacaaaaagaactgtgttttgaatgccagttctgctttgaactcctatcaggcggcccctccctataacagcctgtctgtgcacaactcaaacaatggggtgagcccactcagtgccaaactggagccctcaggacggacctcgctgcccggcggccccgcggacatagtgagacaggtgggcgcggtgggaggcagcagtgactcctgtcccctctctgtgccctcccttgcgctccacgcaggggacctctctctggcctcacacaatgctgtgtcttctctgcccctctcttttgacaaatcagaaggaaaaaagcgtaagaactcgagttctagtagcaaagcctgtaaaatcactaaaatgcctggtatgaatagcgttcacaaaaagaacccgcccagccttctcgcaccggtgcccgatcccgttaacagcacctcctctcggcaggtaagggacctcctggcaccgccttcaccggctctggggggcagggggagctgggcagcgcccctgcttagccgggcggctccgacaggtaacacaagcttgattcctgttctcgttttccccgaaggcagttttcaccctctgctttgagagcactttactgaacaagtacttgataccacgctcactatgtgctagacactgttctcggcactttacggttattacctcactgagtcctcacgacaccccagtgcagtgagtgcagttatcactttacagatgagtaaactgaggcacagagagattctgagttccccactccacatcggtcagttttatcttttgaggttctgagaacattgtcattaaagagttctgttgct

SEQ ID NO: 7678 - DNA, 1674 bp, Homo sapiens
atatcccaagactggtcagactttgctctttggtgggaacagaagcattgctggcttctgaaaacccactggaccctggacaaatatggggtccaggcagatgcaaagcttctcttcacccctcagcataaaatgctgcgccttcgtctgccgaatttgaagatggtgaggttgcgagtcagcttctcagctgtggtttttaaagctgtcagtgatatctgcaaaatcctgaatattagaagatcagaagagctttccttgttaaagccgtctggtgactattttaagaagaagaagaaaaaagacaaaaataataaggaacccataattgaagatattctaaacctggagagttctccaacagcttcaggttcatcagtaagtcctggtttatacagtaaaaccatgacccctatatatgaccccatcaatggaacaccagcatcatccaccatgacttggttcagtgacagccctttgacggaacaaaactgcagcatcctcgcattcagccaacccccccagtccccagaagcacttgcggatatgtaccagcctcggtctctggttgataaagccaagctcaatgcaggttggctagactcctcacgctcccttatggaacaaggcatccaagaggatgagcagctgctcttacgatttaaatattattctttcttcgacttgaatcctaaatatgatgctgtccgaataaaccaactctatgagcaagccaggtgggccattctcttagaagaaattgattgcacagaggaagaaatgttgatctttgcagctctacagtaccacattagcaaactgtcgttgtctgctgaaacacaggattttgcaggcgagtccgaggttgatgaaatagaagcggcgctttctaatttggaagtaaccctagaaggtggaaaagcggacagccttttggaggacattactgatatccctaaacttgcagataatctcaaattatttaggcccaagaagttactaccaaaagctttcaaacaatattggtttatctttaaagacacatccatagcatactttaaaaataaggaacttgaacaaggagaaccactagaaaaactaaatcttagaggctgcgaagttgtgcccgatgtaaatgtagcaggaagaaaatttggaatcaagttactaatccctgttgccgatggtatgaatgaaatgtatttgagatgtgaccatgagaatcaatacgcccaatggatggctgcctgcatgttggcatcgaagggcaaaaccatggcagacagctcctaccagccagaggtcctcaacatcctttcatttctgaggatgaaaaacaggaactctgcatctcaggtggcttccagtctcgaaaacatggatatgaacccagaatgttttgtgtcaccacggtgtgcaaaaagacacaaatccaaacagctggccgcccggatcctggaggcgcacctgcaagccccattccattcctacagatctctcagccacctgtaagtcctttgtgaagatgtgggtgacacagggggacaggaaaacccatttctcaacccagatccatgtctccactgcttctactctgggttgggattcaggaagacaggcacagtcctctctgttcatagaaacacctgccagtgtcaaggattccagtcaggt

SEQ ID NO: 7679 - DNA, 2284 bp, Homo sapiens
acggggccgcctggagaggtgctgggagctgggtggagcttagaggaattaaactttggccctgcgcctcgtccagcctaggttccacccttttctgggaacaatgaatctcgctgtgttgtccaggctggagtgcagtggcaccatctcggctcactgcaacctctggctcccaggttcaagcgattctcctgcctcagccccctgagtagctgggattacaggcacgcgccaccactcccaggctccggtagattgcaaatgacctgctttctttctgttcccgggcgtttggacccctgtcttggaccgctgtcggatagtaaatcccaagtaaggtacctgccgtcggcagatttgagctttcttcttggacacctaatacccagagtcctccaggctccggtagattgcaaatgacctgctttctttctgttcccgggcggcatcggacccgtcggagagtaaatcccaagtaaggtacctgccgttggcagatttgagctttcttcttggacacctaatacccacagtcctccaggctccggtagattgcaaatgacctgctttctttctgttcccgggtggcatcgacccgtcggagagtaaatcccaagtaaggtacctgccgttggcagatttgagctttcttcttggacacctaatacccacagtcctccaggtgagtcctaaggatcttaggatacgcgatgggggtcctaaggcagggggggaagaggggatggctgtcacccaacccaaaatgggcggcctttatgttcaggttttgcccaagagtcagcttatttgcttcttgtactatcagggcagttgatgccacggccctcaaacatgaggggccatcctttagaaaccctctctagttgtttagacaactaggccaccggcctcagccagggccccagagtttcggttaaaagtccagctgccatcttttctctatctgacgcattcaatggaaaaggctttgtcagatcgggtagccccagggctggggctgccagaagtttttcctttaactcctgaaagactttttgttcttgggatccccattccaaaggttccgttccccgccccctttgtgacctcatacaaaggcttggctaatactgcaaagtttgggatccagtctacaaaaccccacagctcccaagaattcccttacctgccttctgcccttaggctccggtagattgtaaataacctgctttctttctgttcccgggctgcgttcggacccctgtcggatagtaaatcccaagcaaggtacctgccgtcagcagatttgagctttcttcttggacacctaatacccacagtcctccaggctccggtagattgcaaatgacctgctttctttctgttcccgggctgcgttcggacccctgtcggatagtaactcccaagtaaggtacctgccgtcggcagattggagctttcttcttggagacctaatacccacagtcctccagaaaaacaaacaaagacatggatttactgtgcatattagcagatccatactggaaaatgcatggaggtttcatatacaccacttacagttttcagctcctcagtagtgacaaagccatacccatcattgtcgattcgatcaacaatcttccctagcctctccttgctctcgtccggggtgagctcgtcgaagttcttggagtcctccttgcccaggaaggcctcgtggtcgtactggaagctctggttgtcctcagggggccgctcgcccagctccgagtcgggccgcaccacgcgctctttgcgcaccgtgggcttggcccgcagaacccgcggcgccagcaccagcgccagcagcagccccagggctaaccccggcggccaccgcgcgccatcgtcccgaggagagggcggccgggagggagacgctgagcgagcgacaacagcggcagctcgggaatgggggctcggagcgcggcggccaagttttatgttatgtatattttacaagtaaaaaaattttttcacctcagcctgaactgaacactagctgacagacgttttgatttctttgaccatcacggaatcgtggccaagcgcggtggctcacatctgtaatcccaacactttgggaggtcaagatgggcggattgcttgaatccaggtgtttgagatcagcctgggcaacatgacaaaaccctgtttctagtaaaaatacaaaaattaaccaggctcaagccatgaccatgcaccattgcactccagcctaggcgacagagcaggaccctgtctc

SEQ ID NO: 7680 - DNA, 1260 bp, Homo sapiens
cagacaacagacacgcgaggtcaggaagaagccgcttataaattaccgcttccttcgcgccgccgccaacgccgagccccgaggaccgcaagcccagaggacaagctgcgccaagagggagtgctggagctgttcacccagcgggtcagagagcgagccgggcaggccagcccccggccggcggaaccctggcacagcctgagcagatgctgcgggcggcgccgcagccaccccagatccagaaccagaaccacagcccttctgaggagctcccaaacaaagcaaggagatggccaccaaggagaagctgcagtgtctgaaagatttccacaaggacatcctgaagccctcaccagggaagagcccaggcacgcggcctgaggacgaggctgagggaaaacctccgcagagggagaagtggtctagcaagatcgactttgtgctctctgtggctggcggcttcgtgggcttgggcaacgtctggcgcttcccgtacctctgctacaagaatggtggaggtgcgtttctcataccgtattttattttcctgtttgggagcggcctgcctgtgtttttcttggagatcatcataggccagtacacctctgaagggggcatcacctgctgggaaaagatctgccccttgttctctggtatcggctatgcctccgttgtaattgtgtccctcctgaatgtctactacatcgtcatcctggcctgggccacatactacctgttccagtccttccagaaggagctgccctgggcacactgcaaccacagctggaacacacctcactgcatggaggacaccatgcgcaagaacaagagtgtctggatcaccatcagctccaccaacttcacctcccctgtcatcgagttctgggagtaaggccacctcattgaagcaaggaggaggacatgggtggggcagagaggatggcccacttccttatctcctcccctgggatacaggagccactgtcttcgggggagtgggaggagggtgcagatctggagataaatttatgcctttggccatagacaggactggaatcccagttctgccacttactggctgtttgaccttaggcaagccactcctcctttctgagcctcagtttctttacctgtaagataaaaagaatgaatcattactaccctgtgaggcaggtatgcatacttatgttgtctaaaaatgatacagttttcttaatgtattttaggaaaaaatatattctgttattgcacagagaaaaa

SEQ ID NO: 7681 - DNA, 628 bp, Homo sapiens
cggtgctgaagggcagggaacaacttgatggtgctactttgaactgcttttcttttctcctttttgcacaaagagtctcatgtctgatatttagacatgatgagctttgtgcaaaaggggagctggctacttctcgctctgcttcatcccactattattttggcacaacaggaagctgttgaaggaggatgttcccatcttggtcagtcctatgcggatagagatgtctggaagccagaaccatgccaaatatgtgtctgtgactcaggatccgttctctgcgatgacataatatgtgacgatcaagaattagactgccccaacccagaaattccatttggagaatgttgtgcagtttgcccacagcctccaactgctgtgagtttaaagataaactgtacatcttcaatattcatatttagacacatgaatagctcctatatcataggagcctaaaagggaatgaaagtcatgttcatcaaatagccatgtttgtattacgagtaaaaagtgaccgtttcaatttaaagataaggattggttagaatctgggttactaaataatatgcaaattctgtgtcttgtttaacttgtttcttttccatttattagcctactcgccctccta

SEQ ID NO: 7682 - DNA, 1528 bp, Homo sapiens
attttctcctggacaaggagagagtgcggctgctgagagccgagcccagcaatcccgatcctctgagtcgtgaagaagggaggcagcgagggggttggggttggggcctgaggcaagcccccaggctccgctcttgccagagggacaggagccatggctcagaaaatggactgtggtgcgggcctcctcggcttccaggctgaggcctccgtagaagacagcgccttgcttatgcagaccttgatggaggccatccagatctcagaggctccacctactaaccaggccaccgcagctgctagtccccagagttcacagcccccaactgccaatgagatggctgacattcaggtttcagcagctgccgctaggcctaagtcagcctttaaagtccagaatgccaccacaaaaggcccaaatggtgtctatgatttctctcagtctctcaatgccaatgacctggccaacagcaggcctaagacccaggtatctctgaacctgacggtgcaactgcacagacatcagcagatggttcccaggctcagaatctggagtcccggacaataattcggggcaagaggacccgcaagattaataacttgaatgttgaagagaacagcagtggggatcagaggcgggccccactggctgcagggacctggaggtctgcaccagttccagtgaccactcagaacccacctggcgcaccccccaatgtgctctggcagacgccattggcttggcagaacccctcaggctggcaaaaccagacagccaggcagaccccaccagcacgtcagagccctccagctaggcagaccccaccagcctggcagaacccagtcgcttggcagaacccagtgatttggccaaacccagtaatctggcagaacccagtgatctggccaaaccccattgtctggcccggccctgttgtctggccgaatccactggcctggcagaatccacctggatggcagactccacctggatggcagaccccaccgggctggcagggtcctccagactggcaaggtcctcctgactggccgctaccacccgactggccactgccacctgattggccacttcccactgactggccactaccacctgactggatccccgctgattggccaattccacctgactggcagaacctgcgcccctcgcctaacctgcgcccttctcccaactcgcgtgcctcacagaacccaggtgctgcacagccccgagatgtggcccttcttcaggaaagagcaaataagttggtcaagtacttgatgcttaaggactacacaaaggtgcccatcaagcgctcagaaatgctgagagatatcatccgtgaatacactgatgtttatccagaaatcattgaacgtgcatgctttgtcctagagaagaaatttgggattcaactgaaagaaattgacaaagaagaacacctgtatattctcatcagtacccccgagtccctggctggcatactgggaacgaccaaagacacacccaagctcggtctcctctt

SEQ ID NO: 7683 - DNA, 1452 bp, Homo sapiens
aacggctagcctgaggagctgctgcgacagtccactacctttttcgagagtgactcccgttgtcccaaggcttcccagagcgaacctgtgcggctgcaggcaccggcgcgtcgagtttccggcgtccggaaggaccgagctcttctcgcggatccagtgttccgtttccagcccccaatctcagagcggagccgacagagagcagggaaccggcatggccaaagccgcggcgatcggcatcgacctgggcaccacctactcctgcgtgggggtgttccaacacggcaaggtggagatcatcgccaacgaccagggcaaccgcaccacccccagctacgtggccttcacggacaccgagcggctcatcggggatgcgggtgtgatcgcggggctcaacgtgctgcggatcatcaacgagcccacggccgccgccatcgcctacggcctggacagaacgggcaagggggagcgcaacgtgctcatctttgacctgggcgggggcaccttcgacgtgtccatcctgacgatcgacgacggcatcttcgaggtgaaggccacggccggggacacccacctgggtggggaggactttgacaacaggctggtgaaccacttcgtggaggagttcaagagaaaacacaagaaggacatcagccagaacaagcgagccgtgaggcggctgcgcaccgcctgcgagagggccaagaggaccctgtcgtccagcacccaggccagcctggagatcgactccctgtttgagggcatcgacttctacacgtccatcaccagggcgaggttcgaggagctgtgctccgacctgttccgaagcaccctggagcccgtggagaaggctccacccgcatccccaaggtgcagaagctgctgcaggacttcttcaacgggcgcgacctgaacaagagcatcaaccccgacgaggctgtggcctacggggcggcggtgcaggcggccatcctgatgggggacaagtccgagaacgtgcaggacctgctgctgctggacgtggctcccctgtcgctggggctggagacggccggaggcgtgatgactgccctgatcaagcgcaactccaccatccccaccaagcagacgcagatcttcaccacctactccgacaaccaacccggggtgctgatccaggtgtacgagggcgagagggccatgacgaaagacaacaatctgttggggcgcttcgagctgagcggcatccctccggcccccaggggcgtgccccagatcgaggtgaccttcgacatcgatgccaacggcatcctgaacgtcacggccacggacaagagcaccggcaaggccaacaagatcaccatcaccaacgacaagggccgcctgagcaaggaggagatcgagcgcatggtgcaggaggcggagaagtacaaagcggaggacgaggtgcagcgcgagagggtgtcagccaag

SEQ ID NO: 7684 - DNA, 1274 bp, Homo sapiens
gcccccctccccgccttttttgaaaaagcattttaccaccaaccaccaccccaatccaacccacaccgaaccttcgcgcaccccctacaccccaacaacaacaacaactgcaaaatagaaaacaaatccccaaacccaggcgaaaagcagccaacaccggcggcggcggcggcctcggcaagcacggccagcgcgctcggactgcaagagggttaaaagtgtagattggatttcacccctggaaatctagcacgccgagtgaacttgaatctttggctatttaaggaggactgggtttgttgtgaagttgcggtgatccagcgcagagccccgtcctgattgatcgcatcgcggggctcagatgactgtaaaatgaatagatgaaattcttgcttctcgaagattttcttgggcatctcccggaaagtgcgttttaaggcgaagtcatgatgtattctcccatctgtctcactcaggatgaatttcacccattcatcgaggcacttcttccacatgtccgtgcaattgcctatacttggttcaacctgcaggctcgaaaacgcaagtactttaaaaagcatgagaagcgaatgtcaaaggatgaagaaagagcagtcaaagatgagcttctcagtgaaaagcctgaaatcaaacagaagtgggcatccaggctccttgccaaactgcgcaaagatattcgccaggagtatcgagaggactttgtgctcaccgtgactggcaagaagcacccgtgctgtgtcttatccaatcccgaccagaagggtaagattaggagaatcgactgcctgcgacaggcagacaaagtctggcgtctggatctagtcatggtgatcctgttcaaaggcatccccttggaaagtaccgatggagagcggctcatgaaatccccacattgcacaaacccagcactttgtgtccagccacatcatatcacagtatcagttaaggagcttgatttgtttttggcatactacgtgcaggagcaaggtaagaatttcttttcttcaaataaatgcatcaagatatagatgtccttgcattaccaacaatccatagtaaaacaatcattttacaaagccgcataccaaaagtagactgaagtttgagctgtcacagatggtaggtcatttccaaacttggcctggtgggaggaaaaatggcctgcagatagccaggtgacagactgttacctgaggtttgttatataaatgtgggacttaataaactgctatgagctttattattcaaaaaaa

SEQ ID NO: 7685 - DNA, 859 bp, Homo sapiens
acgaccatctctcaaggaagcaaagtgtctttcattagttatggtaaatttttgtttgtttgttttctaagaaacaaatcaaggcagtttaagttagcagcattttcctttatgactaaaaggtgggttttcataacgttttcttaggatgatgaaatagaaagtgaagcaaaaaaagaatcactttctcccggaaaattgaaactaacttttgaagaactggagcgacaaagacaagaaaaccgaaagaagcaagctgaagaggaagcaagaaaacgtttagaagaagagaagcgtgcttttgaagaagcaaggcggcaaatggtaaatgaagatgaggaaaaccaagacacagcaaaaatttttaaagggtaccgccctggtaaactcaaactcagttttgaagaaatggaaaggcaaagaagagaagatgaaaaaaggaaagcagaagaagaagccagaaggagaatagaggaagaaaagaaggcgtttgctgaagcaaggagaaatatggtagtagatgatgactccccagagatgtataagacaatctctcaagaatttcttacaccgggaaaactggaaattaattttgaagaattattaaaacaaaaaatggaagaagaaaaacgacgaacagaggaggaacggaagcataagctagaaatggagaaacaagaatttgaacaactgagacaggaaatgggagaggaagaggaagaaaatgaaacctttggattgagcagagaatatgaagaactgatcaaattaaaaaggagtggctctattcaagctaaaaacctaaaaagcaagtttgaaaaaattggacagttgtctgaaaaagaaatacagaaaaaaa

SEQ ID NO: 7686 - DNA, 3606 bp, Homo sapiens
aggttggcactcatcatgagcccctgttctcattctgcaaatggtgaagctctctattgtcctgaccccacagttcctgtcccatgaccagggccagctcaccaaggagctgcagcagcatgtaaagtcagtgacatgcccatgcgagtacctgaggaaggttatcaatactctggctgaccatcatcatcgtgggactgactttggtggaagtccttggttacatgtcattattgcatttccgacaagttataaagttgtcattaccctctggatagtttacctttgggtgtctctcctgaagactatcttctggtctcgaaatggacatgatggatccacggatgtacagcagagagcctggaggtccaaccgccgtagacaggaagggctgaggtccatttgtatgcacacaaagaaaagagtttcttcctttcgaggaaataaaattgtcctgaaagacgtcattactctacggagacatgtggaaacaaaagttagagctaaaatccgtaagaggaaggtgacaacgaaaatcaaccatcatgacaaaatcaatggaaagaggaagaccgccagaaaacagaaaatgtttcaacgtgcgcaagagttgcggcggcgagcagaggactaccacaaatgcaaaatccccccttctgcaagaaaggctctttgcaactgggtcagaatggcggcagcggagcatcgtcattcttcaggattgccctactggccctacctcacagctgaaactttaaaaaacaggatgggccaccagccacctcctccaactcaacaacattctataactgataactccctgagcctcaagacacctcccgagtgtctgctcactccccttccaccctcagcggatgataatctcaagacacctcccgagtgtgtgctcactccccttccaccctcagcggatgataatctcaagacacctcccgagtgtgtgctcactccccttccaccctcagcggatgataatctcaagacacctcctgagtgtctcctcactccccttccaccctcagcggatgataaactcaagacacctcccgagtgtctgctcactccccttccaccctcagctctaccctcagctccaccctcagcggatgataatctcaagacacgtgccgagtgtctgctccatccccttccaccctcagcggatgataatctcaagacaccttccgagcgtcagctcactccccttccaccctcagctccaccctcagcagatgataatatcaagacacctgccgagcgtctgcgggggccgcttccaccctcagcggatgataatctcaagacaccttccgagcgtcagctcactccccttccaccctcagctccaccctcagcagatgataatatcaagacacctgctgagcgtctgcgggggccgcttccaccctcagcggatgataatctcaagacaccttccgagcgtcagctcactccccttccaccctcagctccaccctcagcagatgataatatcaagacacctgccgagcgtctgcgggggccgcttccaccctcagcggatgataatctcaagacaccttccgagcgtcagctcactccccttccaccctcagctccaccctcagcagatgataatatcaagacacctgccgagcgtctgcgggggccgcttccaccctcagcggatgataatctcaagacaccttccgagcgtcagctcactccccttccaccctcagctccaccctcagcagatgataatatcaagacacctgccgagcgtctgcgggggccgcttccaccctcagcggatgataatctcaagacaccttccgagcgtcagctcactccccttccaccctcagctccaccctcagcagatgataacatcaagacacctgccttccaccctcagcggatgataatctcaagacaccttccgagcgtcagctcactccccttccaccctcagctccaccctcagcagatgataatatcaagatacctgctgagcgtctgcggattccgcttccaccatcagccgatgataatctcaagacaccttccgagcgtcagctcactccccttccaccctcagctccaccctcagcagatgataatatcaagacacctgccgagcgtctgcgggggccgcttccaccctcagcggatgataatctcaagacaccttccgagcgtcagctcactccccttccaccctcagctccaccctcagcagatgataatatcaagacacctgccgagcgtctgcgggggccgcttccaccctcagcggatgataatctcaagacaccttccgagcgtcagctcactccccttccaccctcagctccaccctcagcagatgataatatcaagacacctgccgagcgtctgcgggggccgcttccaccctcagcggatgataatctcaagacaccttccgagcgtcagctcactccccttccaccctcagctccaccctcagcagatgataatatcaagacacctgccgagcgtctgcgggggccgcttccaccctcagcggatgataatctcaagacaccttccgagcgtcagctcactccccttccaccctcagctccaccctcagcagatgataatatcaagacacctgccgagcgtctgcggggagcgtctgcgggggccgcttccaccctcagcggatgataatctcaagacaccttccgagcgtcagctcactccccttccaccctcagctccaccctcagcagatgataatatcaagacacctgccgagcgtctgcgggggccgcttccaccctcagcggatgataatctcaagacaccttccgagcgtcagctcactccccttccaccctcagctccaccctcagcagatgataatatcaagacacctgccgagcgtctgcgggggccgcttccaccctcagcggatgataatctcaagacaccttccgagcgtcagctcactccccttccaccctcagctccaccctcagcagatgataatatcaagacacctgccgagcgtctgcgggggccgcttccaccctcagccgatgataatctcaagacacctcccttagctactcaggaggctgaggcagaaaaaccacgcaaacccaagaggcagagggcggctgagatggaaccacctcccgaacccaagaggcggagggtcggtgacgtggaaccgtcacgcaaacccaagaggcggagggccgctgacgtggaaccatcatcacccgaacccaagaggcggagggtcggtgatgtggaaccgtcacgcaaacccaagaggcggagggccgctgacgtggaaccatcatcacccgaacccaagaggcggagggtcggtgacgtggaaccgtcacgcaaacccaagaggcggagggccgctgacgtggaaccatcattacccgaacccaagaggcggaggttgagctgagaagaggccagtgcactcaagcctgagcaataagaataaaaccgagtagaacaaaataaaaaattcaaaaaacaaaacaaaacccacactccaaaaactaacaaagaataaataaataatataaaaataaaataaatactgcagtcctt

SEQ ID NO: 7687 - DNA, 1351 bp, Homo sapiens; identical to SEQ ID NO: 6333

SEQ ID NO: 7688 - DNA, 5179 bp, Homo sapiens
atggatttactgtacggtctcgtgtggctgctgacagtcctcctggaggggatctctggccaaggagtgtacgctcctcccacggttcgtattgtgcactcaggcttggcctgtaacattgaagaggagcgctactccgaaagggtctacactatccgggaaggagaaacccttgagttgacttgtctagtcacaggacatccacgtccacagatcaggtggaccaaaacagcaggaagtgcctctgacagattccaagactcaagtgtcttcaatgagactttgaggattacaaatattcagcgacaccaaggaggccggtattactgtaaagcagagaatggcttggggtctccagcgataaagtcaatcagagtggatgtatactatttggatgatccagtagtaactgttcatcaaagtataggtgaagctaaagaacaattttactatgagagaacagtgttcctccggtgtgttgccaattccaatcctcctgttcggtatagctggagacgtggccaggaggtcttgctgcaaggatctgataaaggagttgagatttatgaaccattctttacccagggtgaaacaaagatcttaaaactaaagaatcttcgacctcaggactatgctaattatagctgcattgcttcagtgaggaatgtatgtaatattcctgataagatggtgtcgtttagactgtccaataaaacagcatcaccgtcaattaaactcttggtggatgatcctatagttgtaaatcctggagaggccataacattagtatgtgttacaacaggaggagagcctgcaccttctctcacctgggtcaggtcctttgggactctgcctgaaaagactgttttgaatggaggaactttgaccatacctgccatcacctcagatgatgctggtacttacagctgcattgccaataataatgtgggaaaccctgcaaaaaagtccaccaacatcattgtgagagcattaaaaaaaggacgattttggatcacaccagatccttatcacaaagatgacaacatccagattggccgtgaggtgaaaatatcttgccaagtagaagctgttccttctgaggagctaacatttagttggtttaaaaatggtcgtccattaagaagttctgagcggatggtcattacacagactgatcctgatgtctctccgggaacaacaaacttggacatcattgatttaaaattcacggattttgggacgtacacatgtgtagcatctctgaagggaggaggaatatctgatatcagtatcgatgttaatatatccagcagcacagttccacccaatctgactgttccacaggaaaaatcaccattggtcaccagagaaggagacacaatagaactgcaatgtcaagtaactggcaaacctaaaccaatcatcctttggtctagagcggataaagaagttgcaatgcctgatggatcaatgcaaatggagagttatgatggaacactgaggattgtgaatgtatctagggaaatgtcaggaatgtacagatgtcagaccagccaatacaatggatttaacgtgaaaccaagggaagccttggtgcagctcatcgttcagtatccccctgcagtggaaccagcattcttggaaatccggcaaggacaggatcgaagtgtcactatgagttgcagagtactgagagcctatccaatacgggtgctgacctatgagtggcgcttgggcaataaattattacggacgggtcaatttgactctcaggaatacacagagtacgctgtgaagagtctttccaatgaaaactatggggtttataactgtagcatcataaatgaagctggagctgggagatgcagctttcttgttacaggaaaggcctatgctccagaattctattatgatacctacaatccagtatggcagaacagacaccgtgtttattcttacagtctacagtggacacagatgaatcctgatgcagtggatcggattgttgcataccggttgggcatcaggcaggctggacagcagcgctggtgggagcaggagattaaaataaatgggaatattcaaaagggagaattaattacatataacttgacagagctaattaaaccagaagcttatgaagtccgactgactcctctcaccaaatttggtgaaggagattcaacaattcgtgtgatcaaatatagtgctcctgtaaatcctcatttgagagaatttcattgtggatttgaagatggtaatatttgtttgttcactcaagatgatacagataattttgactggacaaagcaaagtacagcaacaagaaatacaaaatatactcctaatacaggacctaatgctgaccgtagtggctccaaagaaggtttttatatgtacattgagacatcacgacccagattggaaggcgaaaaggctcgacttctcagccctgttttcagcatagctcccaaaaacccttatggacccacaaacactgcatattgtttcagcttcttttatcacatgtatggacaacatataggtgtcttaaatgtttatctacgtttgaaagggcaaacaacaatagagaatccactgtggtcttcaagtgggaataaaggacaaagatggaatgaggctcatgttaatatatacccaattacttcatttcagctcatttttgaaggtatccgaggtcctggaatagaaggtgacattgctattgatgatgtatcaattgcagaaggagaatgtgcaaaacaagacctagcaactaagaattccgttgatggtgctgttgggattttggttcatatatggctttttcccattatcgtcctcatctctatcttaagtcctcgaaggtgaccttatcctggcagaggctataaaagattcaccaggcactggcatgaagaaagagtctttgtaaatggacattgaacaaacaaactaccaaagattcctccactgactactgactcaaaaataaaataataaaaacaaatttttttaagcactggggataaaaagacatcatggaagtataacttattccagactaaacataaaagataatcttgacctgagtagagaagagaccttcaggtgcttttgtggctaaaaagattacagcgtcatctggttgaactctggaaaaaaaaaaaaaaatgaaaaaaagaaaaaaaaaagagctatagaaatccttgtcaaagcacaaagtcatggctggttttgtttcaaatgaatagtttgcttgttaccatggaaacctaatggcctgccaacaaaaacctcactgtaaacagggtacgtgaagagctggcatttattttccttacgagaaggttttcgtagagaattaaataaatgtaggcccttttacctttggctgttacccttccttgaaaataacccgaactcagaattatttaaagcattcatgtttctccccaccttatccccatcccacctttattattattatttttctcccatggctaagctagataactgtatgctgtctctttttgcatgcactactatccaggatggtaaacctgggcttacatgttacacaggcttatcggagtttgcttgcggccacttgaacacccaaactacgtcatctgttccaatgaagaaaccaaaccaccatcttttataaattgccatggaaaccaagtgccttcaatgaaacaagcctgaataattttcaactcagaagcttgcactgctaagagtggtttgtgtaaaactattttataaacaaactacagagcctaaatgtgcaaattacaggcaagacaacaaagccgcttctgaagaagaaaggaccgaagctgctgcgtaagcccatgcagacaagatatttgttgtttaacctcctagacagccatggcctttcggcttattgtccattagaaaatcacttccattgagaccagacatggagcaacactttttttcttccaggttattaaatgggtcaaccagagcaaaaggttattaagaatacttagtgcagaaggtggtaaaacacaaaagtgatttttttactctaacctccatttgaaatgaaattggccctagctttagagggaacaagaaaatgtttgggattgcagtgcatactaactctacagtggaactgggcctgaaaaatctggctttattctaaactctgagggtaatatgcctctgccctttagtcagactctgtgcaaattgtgaaatattattttattattttaccaagattataaaaacacttttacaaaaaaacaaaaacctgtaaaaataattttgagctacctgacgacaaatcatatctttaaccagccagttttccaatgcattgtaaatttcacttaaacctgttggttatgaaaatttgaagatcattttccttaaattatctcagcttttaacttcatttaaaaagacttttgtctaagaagaatattattattatatgttctttcaacaccccaggattaaaaaaactgattatgcaagcaattggaatataagtattaaattatagcatttgcaaatattaatataaaagcacaacaaaatgtagtggaaaatgacaaagcttgttttttaaaacaattctgtagaaatgtttgtgcaaattcagtaattcaacttaaaatataattttacagctatgttcaataaagcctctttccaggtaaggtatgacaagcagtatgtgtgtttgttgagcaatgttcacttatcactaaaatgaaattagttatacaatttattggttaccatgggataaatcttcagtgctccacataccttaatgtctgcagaaagaaattttaataggaactccctgatgcactcccctatattgtaatacatgcagaaagcagttaaacctttgaaggtaaaatatgaaacatatatgaacctggaatttaatgtctattttcagtcagttcaaaaggggaccagtttgaatatttaggtagtgatggaattgatctgaaccaagtcctttaaattaaacataataaacaaatgagtttcataacttatttgaatgaattagacatcttaaaattttttcagagtttcacagtaacccatatactttatcagaccaaagagattcaagtacacaatatctggggcatttcttttacgttttacaaaa

SEQ ID NO: 7689 - DNA, 2372 bp, Homo sapiens
gcttgaaccgctggagcccccgagggacgcgggggttcagagagcaagaggaaggaaccagactgacagggtcgccagaggcagtcccagcacaaaggttctccttactatgacaatgtccgccccctctcttaccctgattcggatgctgtgctgatttgctttgacatcagtagaccagagaccctggacagtgtcctcaaaaagtggaaaggtgaaatccaggaattttgtccaaataccaaaatgctcttggtcggctgcaagtctgatctgcggacagatgttagtacattagtagagctctccaatcacaggcagacgccagtgtcctatgaccagggggcaaatatggccaaacagattggagcagctacttatatcgaatgctcagctttacagtcggaaaatagcgtcagagacatttttcacgttgccaccttggcatgtgtaaataagacaaataaaaacgttaagcggaacaaatcacagagagccacaaagcggatttcacacatgcctagcagaccagaactctcggcagttgctacggacttacgaaaggacaaagcgaagagctgcactgtgatgtgaatctttcattatctttaatgaagacaaaggaatctagtgtaaaaaacaacagcaaacaaaaaggtgaagtctaaatgaagtgcacagccaaagtcatgtataccagaggcttaggaggcgtttgagaggatactcatctttttggaatcctgaccttaggttcggcatgtagaccaagtgatgagaagtgaatacatggaagagtttttaagtgtgacttgaaaaatatgccaaaaaatgagagatacaaatgagctagaggaagatgaggggggatgcgagtacctccaagaagaaaaatcacactctgaatggtgcttgcatttttgggttttttttttttgttataatctattcatggatctccactttgatttaatttttaaatgttttaatctcctttacaaaaagtatacgttaatataccgtcctcaagggggaactggcactgtgaccttagcatttagttttctagaggatgtgatctaatttctttctagctcatcattaaaaaggaaattgtatcaggacccatgggatatatccagaggcaaactttatgaggctttgaaatcttgccttcctgaagatagctgagtaggatggttctaaggaaagcctttgcaatcttgcaagatttgtagaccagcactacaaagatcgcatagatcaaataggaaaaaaaatgtcgatttttattcagtctgatggttctgttcttcattgtgattgtcattaaaaagtggtaaattgctcaatgtaatatttttgtgcgctgtttagaagttgtgtgattttttgccatcgttgataaaaatgcaaagtcaaataaaaggtgtcttggtttgatgtcatagaatgatccaaggagagaaaaaaggtagttactgttttcaccagaaaaggtaatgagtgaaggaaagaatagtagcagaaagcacagtttgtgagtaaagctgtctggaattaagttaccaaaaatacaaagcaaaaggactattattttgggttgaagctccaaaactgacagcatctgataatctgttggtttatttcacttttcattaaatgaacattgatgagagaagatgccacttacccaagctttagagaatccctagtggaagattatatgataaactttcagtcctgacataacactagggcatttctagagtgtcattgctaaaacctcactgaacagatgcagccaaggtctgtgttcagcacttggtctctgttgttacgtaaaataataagcatttaaaatagtttacagatatttttgaccagttccttttagagattctttcagagaagaaaccagatctgacctgtttattgttggcgcttgttgaaaacgagctttctttcccatgatagtgcttcgtttttgaagtgttgaagctgtgctccccttaaatcgtggcaggagagattaaggtaattacaacactcagttctatgtcttacaagcactttgtcttgtctctgcaagaaaattcgattccagtcatttcccataaaatacagacattttaccaacataatatgctttgattgatgcagcattatgctttgggcagtattacaaaatagctggcgagtgctttctgtatttaaatattgtaaaaagaaaataagttataactgttataaagcagaacttttgttgcattttttaaactgttgaagtcactgtgtatgtttgtttggtcaatgtttccgcagtatttattaaaacatactttttttttcttcaaataaaaaagtaacca

SEQ ID NO: 7690 - DNA, 720 bp, Homo sapiens
gtcagcatcagtttccttgttcataaaatgaaggggctggagtagttgaactggaaggttttttctaattttgcttctttgtgaatctaagtgaggtgagattgcagcaggatggttgaagactagctaacaaaagaacttctggatgtgaacaacgttagcaaaaaggaagcctaattctttctaccacactcccgaggaagctcccatggacaaagccggataatccgaaaggcgtacctggaagacttttacacccggatgatgcatgagtgctatcagatatgggcccagctggagcacgaggctggaacccaattgcacaggcagactggattactgctgctgggaatgaaagagaatcaagaattaaagacaatccaggccaatctgtcgaggcagagggtagaacaccagtgtctttcatctgaggaactgaagcaacgtttcccaaatattcggttgcccaggggagaagtggggctcttggacaattccggaggagttatctatgcatataaggccctcagagccctgcaggatgcaattcgacagctaggaggcatagtgcgtgacggagagaaggtggtggagataaacccagggctactggtcacggtgaaaaccacctccaggagctaccaagctaagagcttggtcatcacagcaggtccttggaccaaccagctcctccgtcccctgggcattgagatgcctctc

SEQ ID NO: 7691 - DNA, 510 bp, Homo sapiens
gaatggctgggtgaacagccaagggagaaagggaagggatggtttctatcattggattgaactgtaaaggagctgcagggtgacagatgttggcaggaattccagtagagtttgtgtgtacagtgactccctagcagggctgacacctgcacaggctaggtgtacaccctagcagaaggaaaggttgcaacatcaccaaggtggggcatttgccagaggtacataccaaggcatttgtaaagctgaggctgctggtaaagttccaagaagccctttttaaggctgagtagagggaggagaagccaagggcaacccaaggccatctcaccactactccgaggaatggtccatggagacaacagattcaagagcacatataatgcaagttccttgattcatgctgtctattggctgggaactttgagctcttccttggaggagggagggtgatcaggttgtctgtgttttgttgggaggccatattattgctgaagggattgaagaattttc

SEQ ID NO: 7692 - DNA, 2168 bp, Homo sapiens
acgtgtgaggatgtcagcgcctgtgtggccgcgggactcaaggctggcctggctcaagtgaacagcacgtccaggaggcgacctcgtccgcgggtttgcattctggggtggacgagctgggggttcggtccgagcccggtgggaggctcccggagcgcagcctgggcccagcccaccccgcgccggcggccatggcaggcaccctggacctggacaagggctgcacggtggaggagctgctccgcgggtgcatcgaagccttcgctggcggccaagctgctccacatctaccaacaatcccggaaggacaactccaattccctgcaggtgaaaacgtgccacctggtcaggtactggatctccgccttcccagcggagtttgacttgaacccggagttggctgagcagatcaaggagctgaaggctctgctagaccaagaagggaaccgacggcacagcagcctaatcgacatagacagcgtccctacctacaagtggaagcggcaggtgactcagcggaaccctgtgggacagaaaaagcgcaagatgtccctgttgtttgaccacctggagcccatggagctggcggagcatctcacctacttggagtatcgctccttctgcaagatcctgtttcaggactatcacagtttcgtgactcatggctgcactgtggacaaccccgtcctggagcggttcatctccctcttcaacagcgtctcacagtgggtgcagctcatgatcctcagcaaacccacagccccgcagcgggccctggtcatcacacactttgtccacgtggcggagaagctgctacagctgcagaacttcaacacgctgatggcagtggtcgggggcctgagccacagctccatctcccgcctcaaggagacccacagccacgttagccctgagaccatcaagctctgggagggtctcacggaactagtgacggcgacaggcaactatggcaactaccggcgtcggctggcagcctgtgtgggcttccgcttcccgatcctgggtgtgcacctcaaggacctggtggccctgcagctggcactgcctgactggctggacccagcccggacccggctcaacggggccaagatgaagcagctctttagcatcctggaggagctggccatggtgaccagcctgcggccaccagtacaggccaaccccgacctgctgagcctgctcacggtgtctctggatcagtatcagacggaggatgagctgtaccagctgtccctgcagcgggagccgcgctccaagtcctcgccaaccagccccacgagttgcaccccaccaccccggcccccggtactggaggagtggacctcggctgccaaacccaagctggatcaggccctcgtggtggagcacatcgagaagatggtggagtctgtgttccggaactttgacgtcgatggggatggccacatctcacaggaagaattccagatcatccgtgggaacttcccttacctcagcgcctttggggacctcgaccagaaccaggatggctgcatcagcagggaggagatggtttcctatttcctgcgctccagctctgtgttgggggggcgcatgggcttcgtacacaacttccaggagagcaactccttgcgccccgtcgcctgccgccactgcaaagccctgatcctgggcatctacaagcagggcctcaaatgccgagcctgtggagtgaactgccacaagcagtgcaaggatcgcctgtcagttgagtgtcggcgcagggcccagagtgtgagcctggaggggtctgcaccctcaccctcacccatgcacagccaccatcaccgcgccttcagcttctctctgccccgccctggcaggcgaggctccaggcctccagagatccgtgaggaggaggtacagacggtggaggatggggtgtttgacatccacttgtaatagatgctgtggttggatcaaggactcattcctgccttggagaaaatacttcaaccagagcagggagcctgggggtgtcggggcaggaggctggggatgggggtgggatatgagggtggcatgcagctgagggcagggccagggctggtgtccctaaggttgtacagactcttgtgaatatttgtattttccagatggaataaaaaggcccgtgtaattaaccttca

SEQ ID NO: 7693 - DNA, 2463 bp, Homo sapiens
actgcctgtaaagccctcgcatgagaggccagcctgctagggaaatccaggaatctgcaacaaaaacgatgacagtctgaaatactctctggtgccaacctccaaattctcgtctgtcacttcagacccccactagttgacagagcagcagaatttcaactccagtagacttgaatatgcctctgggcaaagaagcagagctaacgaggaaagggatttaaagagtttttcttgggtgtttgtcaaacttttattccctgtctgtgtgcagaggggattcaacttcaatttttctgcagtggctctgggtccagccccttacttaaagaagaggaaagccatgaacagtcagcagaacagggcaagagttctagccaagagctgggattgaaggatcaagaggacagtgatggtcacttaagtgtgaatttggagtatgcaccaactgaaggtacattggacataaaagaagatatgagtgagcctcaggagaaaaaactctcagagaacactgattttttggctcctggtgttagttccttcacagattctaaccaacaagaaagtatcacaaagagagaggaaaaccaagaacaacctagaaattattcacatcatcagttgaacaggagcagtaaacatagccaaggcctaagggatcaaggaaaccaagagcaggatccaaatatttccaatggagaagaggaagaagaaaaagagccaggtgaagttggtacccacaatgataaccaagaaagaaagacagaattgcccagggagcatgctaacagcaagcaggaggaagacaatacccaatctgatgatattttggaagagtctgatcaaccaactcaagtaagcaagatgcaggaggatgaatttgatcagggtaaccaagaacaagaagataactccaatgcagaaatggaagaggaaaatgcatcgaacgtcaataagcacattcaagaaactgaatggcagagtcaagagggtaaaactggcctagaagctatcagcaaccacaaagagacagaagaaaagactgtttctgaggctctgctcatggaacctactgatgatggtaataccacgcccagaaatcatggagttgatgatgatggcgatgatgatggcgatgatggcggcactgatggccccaggcacagtgcaagtgatgactacttcatcccaagccaggcctttctggaggccgagagagctcaatccattgcctatcacctcaaaattgaggagcaaagagaaaaagtacatgaaaatgaaaatataggtaccactgagcctggagagcaccaagaggccaagaaagcagagaactcatcaaatgaggaggaaacgtcaagtgaaggcaacatgagggtgcatgctgtggattcttgcatgagcttccagtgtaaaagaggccacatctgtaaggcagaccaacagggaaaacctcactgtgtctgccaggatccagtgacttgtcctccaacaaaaccccttgatcaagtttgtggcactgacaatcagacctatgctagttcctgtcatctattcgctactaaatgcagactggaggggaccaaaaaggggcatcaactccagctggattattttggagcctgcaaatctattcctacttgtacggactttgaagtgattcagtttcctctacggatgagagactggctcaagaatatcctcatgcagctttatgaagccaactctgaacacgctggttatctaaatgagaagcagagaaataaagtcaagaaaatttacctggatgaaaagaggcttttggctggggaccatcccattgatcttctcttaagggactttaagaaaaactaccacatgtatgtgtatcctgtgcactggcagtttagtgaacttgaccaacaccctatggatagagtcttgacacattctgaacttgctcctctgcgagcatctctggtgcccatggaacactgcataacccgtttctttgaggagtgtgaccccaacaaggataagcacatcaccctgaaggagtggggccactgctttggaattaaagaagaggacatagatgaaaatctcttgttttgaacgaagattttaaagaactcaactttccagcatcctcctctgttctaaccacttcagaaatatatgcagctgtgatacttgtagatttatatttagcaaaatgttagcatgtatgacaagacaatgagagtaattgcttgacaacaacctatgcaccaggtatttaacattaactttggaaacaaaaatgtacaattaagtaaagtcaacatatgcaaaatactgtacattgtgaacagaagtttaattcatagtaatttcactctctgcattgacttatgagataattaatgattaaactattaatgataaaaataatgcatttgtattgttcataatatcatgtgcacttcaagaaaatggaatgct

SEQ ID NO: 7694 - DNA, 3745 bp, Homo sapiens
catttcctcccagcctcgtgcgggaaatggctttaattctgacggcagggctgtgagggactagcgggaacccgagccttttgtcaaggaactgcggcgtcggtggccagtcatccccgccgccgcggagccgctgcactgctgggggatctcccagcagctctgacgagcgcgggctgcagcatgggcagaaaacgctgccctgcagattagctgggtggattttttaagcgcaccccaccccccaaacccataaaataacaaaaccaacccgcagtggccgaccggagatagctaagatgccgcgcaggagtttccacctggatgtttgaggttgtgtagatgtggccggcacccttgagagtggagctagggggtgcagactgagcagtgaacagaaggagccttggacagggctgggccagcctcccgagttccaggagcgaattgcaaacccaccgggaaaatgagcgaagagacggtccccgaggctgcctcgccgccgcccccgcaggggcagccttactttgaccgcttctcagaggacgaccccgagtacatgcgccttcgcaaccgggcggcggacctgcggcaggacttcaacctgatggagcagaagaagcgcgtcaccatgatcctgcagagtccctctttcagggaggagctggaaggcctcatccaggagcagatgaagaaggggaacaactcctccaacatctgggccctgcgacagatcgcggacttcatggccagcacctcccacgcagtcttcccgacatcttccatgaatgtctccatgatgacgcctatcaatgacctccacacagctgactccctgaacctggccaaaggggagcggctcatgcggtgcaagatcagcagtgtctaccgactcctggacctctatggctgggcccagctgagtgacacctatgtcacgttgagagtcagcaaggagcaggaccacttcctgatcagccctaagggagtttcttgcagtgaagtcacagcgtccagcctgatcaaggtgaacattctgggagaggtggtggagaagggcagcagctgcttcccagtggacaccacaggcttctgtctgcactcggccatctatgcagcgaggcccgacgtgcgctgcatcatccacctgcacacaccggccacagcagcggtgtcggccatgaagtggggcctcctgcctgtctcccacaatgccctgctggtgggggacatggcctattatgacttcaatggggaaatggagcaggaagccgatcggatcaacctgcagaagtgccttggacccacctgcaagatcctggtgctaagaaaccatggagtggttgctctgggtgacacggtagaggaggcattttacaagatcttccacctgcaggctgcatgtgagatacaggtgtcggctctgtccagtgccgggggagtggagaacctcatcctcctggagcaggagaagcaccggccccatgaggtgggctccgtgcagtgggccgggagcacctttgggcctatgcagaagagtcggctgggggagcatgagtttgaggccctcatgaggatgctggacaacctgggctacagaacaggttacacgtatcgccacccctttgttcaagagaaaaccaaacacaaaagtgaggtggagattccagccacggtcacagccttcgtgtttgaggaggacggtgccccggtgcccgccctgcgacagcatgcccagaagcagcagaaggagaagacccgctggctcaatacgcccaacacctacctgcgggtcaatgtggccgatgaggtccagaggagcatgggcagcccccgacccaagaccacgtggatgaaggctgacgaggtggagaaatccagcagtggcatgccgattcgcatcgaaaacccaaaccaatttgtgcctctctatactgacccccaggaagtactggagatgaggaacaagattcgagaacaaaaccgacaagatgtgaagtcagcggggcctcagtcccagctcctggcgagcgtcattgccgagaagagccgaagcccgtctacagagagccagctgatgtccaagggagacgaggataccaaagacgattcagaggagacggtgcccaaccccttcagccaactcactgaccaggagttggaggagtacaagaaagaggtggagaggaagaaactagaacttgatggagagaaagaaactgccccagaagagcctggctcacctgcaaagtctgcacctgcttctccagtgcagagcccagcgaaggaggcagagacaaagagccctttagtctctccttccaagtctttagaggaaggtactaagaagacagaaacaagcaaagccgccaccacagagcccgaaacaacccagccggaaggggtggtggtcaacgggagggaggaggagcagacggcagaggaaatcctcagcaaaggcctgagccagatgaccaccagtgctgacacggatgttgatacctctaaggacaaaaccgagtcggtcaccagcggccccatgtccccagagggctcaccttccaagtctccctcaaagaagaaaaagaaattccgaaccccctccttcctgaaaaagagcaaaaagaaggagaaagtggagtcctgattcatgacacccttgggctccctcctgcctcctctctctcctccccttcccttctcccatctctgtccctgcaagcacagggctaaggagggatagagtaggaccctggaccacattcggaaggggaacttagagatcacccgaccaacccttcgttttacagttgcccaagagaaatcagattacctgagactgggtcatttataatgaacacagatttatttctctcacatctggaagctgggaagtccaagatcaaggcaccagcatttggtgaagccttctttctgtgtcatcccatggcagaagacagaagggcaagagaggaaaccggtccaagcaggatgccttcctttttctgacaggcagcccccagcagtaccatcacaaaccttggtctcttcttgtcaccagcaaagggatgaaggataagtgatgaggagactgaagcacagaggtgaagcagcttgcccaacgtcacactgctgcttagtgatagaggcagtgctagaccccggggctcctgaatgttactgttggaggctcttaacccactgggatcaagaaggtgtcaagagctagactctccctccaggagaatgaacacagacacaaaaccttgcatatatgcttccgggtaaagaacctgcctgcattttggtaccactacgtgctggcctgtcctgggcatgttatatcatgagaaggcagggaaggctgaatcattaaggacatgaatcagattgattctcgtggctttaaaaacaaacactacaggaccagcatgacccgccagcctgttatccacagaggcttgtggtctccattgaaaagaagcaaagacagcacgtcccaactcaaaagattgtgtcatcctaaaggtgaaaggaagagatgatccaagcaaatttaggaccaatagcagactcttcacactgcctggggatagagggaccaccctgggctcctcttactcctggatttacttggatgaccagactcaggacttcatttaaatagaatttggtttcataatggaatcttcagcttgaaatataaatttgtttctgtctccctctgccatctcagcctttcttg

SEQ ID NO: 7695 - DNA, 576 bp, Homo sapiens
gaggtggaatttcatttcttccactaaagcgtttgcggagacttcaagaaaagaaaaagaaaaaaatgtcattagaagaggcgtaacacgtcagtccgtccccaggtttgtgtttcctggagtggccgaaagagatcagttctaacctgctctgcaggaataacggtcctgcctcccgacactcttggcgaggtttttgtacagtttgctccgggagctgtttcttcgcttccacctttttctcccccacacttcgcggcttcttcatgctttttcttctcaccatttctggccaaaactacaaacaagacttcgcagatcgagcctgcgtgctgccgaagcagggcgccgagtccatgcgaactgccatctgatccgctcttatcaatgaagcagccgatcatggcggatggcccccggtgcaagaggcgcaaacaagccaatcccaggaggaaaaacgtggtgaactatgacaatgtagtggacacaggttctgaaacagatgaggaagacaagcttcatattgctgaggatgacggtattgccaaccctctggaccaggagacgagtccagct

SEQ ID NO: 7696 - DNA, 1712 bp, Homo sapiens
gaagcagggcctggaactgcaggatacactcccctcctgctacctaggcaggcgtgagggtgtgacggccgcgcattcgccagacgagagcgatggctgagaacgccgcaccaggtctgatctcagagctgaagctggctgtgccctggggccacatcgcagccaaagcctggggctccctgcagggccctccagttctctgcctgcacggctggctggacaatgccagctccttcgacagactcatccctcttctcccgcaagacttttattacgttgccatggatttcggaggtcatgggctctcgtcccattacagcccaggtgtcccatattacctccagacttttgtgagtgagatccgaagagttgtggcagccttgaaatggaatcgattctccattctgggccacagcttcggtgagtacagtggccaggagctgaccgggcccggagtagggctgggagggaaggataggagctgctgccccacccctttcccctgcacttatgagatctgcaaagagagatgagagggtcagtcagaggttgaccactgtaccctctgacctcaggcaactgccgcaagggacacagggatgagggaaatgtggtcttttgagtggtcaggtctgatgaaggggacatcatggcccagatgctgagcccccagccacccatatggtgccccccccccaactggtgggaagaagctttagggtatgcagctggggagggagtgagggaatgtcacccacagctcttttgtcccccaggtggcgtcgtgggcggaatgtttttctgtaccttccccgagatggtggataaacttatcttgctggacacgccgctctttctcctggaatcagatgaaatggagaacttgctgacctacaagcggagagccatagagcacgtgctgcaggtagaggcctcccaggagccctcgcacgtgttcagcctgaagcagctgctgcagaggcagagaacagcattgacttcgtcagcagggagctgtgtgcgcattccatcaggaagctgcaggcccatgtcctgttgatcaaagcagtccacggatattttgatccaagagagaattactctgacaaggagtccctgtcgttcatgatagacacaatgaaatccaccctcaaagaggactacttcggatacaatcacagcaaccctggcctcggccctgccctgtccctgccatgcaacttcacaactcagctggcctagacccctgggaggcctccaagtccctaagcggttccagtttgtggaagtcccaggcaatcactgtgtccacatgagcgaaccccagcacgtggccagtatcatcagctccttcttacagtgcacacacacgctcccagcccagctgtagctctgggcctggaactatgaagacctagtgctcccagactcaacactgggactctgagttcctgagccccacaacaaggccagggatggtggggacaggcctcactagtcttgaggcccagcctaggatggtagtcaggggaaggagcgagattccaacttcaacatctgtgacctcaagggggagacagagtctgggttccagggctgctgtctcctggctaataatctccagccagctggaggaaggaagggcgggctgggcccacctagcctttccctgctgcccaactggatggaaaataaaaggttcttgtattctc

SEQ ID NO: 7697 - DNA, 554 bp, Homo sapiens
cgttattggctgcgggaagaacctcgccgggacctaacccgaagctccgccccctcgcggttaccctggatacccgtcaggctcgggctgcagagaaggttgatagaagtccagatcctgaggaaatctccagctaaatgctcaaaatataaaatactgagctgagatttgcgaagagcagcagcatggatggattttatgaccagcaagtgccttacatggtcaccaatagtcagcgtgggagaaattgtaacgagaaaccaacaaatgtcaggaaaagaaaattcattaacagagatctggctcatgattcagaagaactctttcaagatctaagtcaattacaggaaacatggcttgcagaagctcaggtacctgacaatgatgagcagtttgtaccagactatcaggctgaaagtttggcttttcatggcctgccactgaaaatcaagaaagaaccccacagtccatgttcagaaatcagctctgcctgcagtcaagaacagccctttaaattcagctatggagaaaagtgcctgtacaatgtcagtgcc

SEQ ID NO: 7698 - DNA, 2099 bp, Homo sapiens
gacaagcagggaacaaggcaacggacggcgcaacccagccccggctgacggacgctggcgactcagacatggacagtagctgccacaacgcgactaccaaaatgttagcgactgctccagctcggggcaacatgatgagcacgtccaaacccttggctttctccattgaacgaatcatggcgcgcaccccagagcccaaggccctgccagtcccccacttcctgcagggagccttacccaagggggaacccaagcactctctgcatctcaactcgtcgatcccctgcatgatccccttcgtgcctgtggcctacgacacgagccccaaggcaggagtgacgggctccgagccgcggaaggccagtctggaggccccggcggcgcccgcggcggtgccctcggctcccgcattcagctgcagcgacctgctcaactgcgcactgagtctcaagggcgacctggcccgcgacgcgctgccgctgcagcagtacaagctggtaaggccgcgtgtggtcaaccactcttcattccacgccatgggcgccttgtgctacctgaaccgaggtgacggcccatgccacccggcagccggcgtgaacatccacccggtggcctcctacttcctcagttcccctttgcacccgcagccaaaaacgtatttagccgaaaggaataaactggtggtcccggcggtggagaaatacccttctggagtagctttcaaagacctgtcccaggctcagctgcagcattacatgaaagaaagcgcccagcttctgtcggaaaaaatcgcgttcaaaacctcggatttcagccgaggctctcctaatgccaagcccaaagttttcacttgcgaagtgtgtggaaaggtctttaatgcgcactataacttaacccgtcacatgccagtgcacacaggagccagacccttcgtttgcaaagtgtgcggaaaaggtttcaggcaagcaagcaccctgtgcaggcacaagatcattcacacgcaggaaaaacctcacaaatgtaaccagtgtggcaaagcatttaatagaagttccactttaaacactcatacccgaatacacgcgggctacaaaccgtttgtgtgtgaattctgtggcaaagggtttcatcaaaaagggaattacaaaaaccacaagttgacccacagcggggagaagcagttcaagtgcaatatctgcaacaaggctttccaccaggtttacaacctcaccttccacatgcacacccacaacgacaagaagcctttcacctgccccacgtgcggcaagggtttctgcaggaactttgacctcaagaagcatgtccgcaagctgcacgacagcagcctggggctggcccgcacgccagctggcgaaccaggcactgaaccgccgcccccgctaccgcagcagccgccgatgacgctgcctcctctgcagccgccgctgccaaccccggggcccctgcagcccgggctccaccagggccaccagtgatcgaggctaagggtcctcccagcctcagccgtgcccccacgctgaggcagcggcagactagagctcctggtccgagttcgtctgcagaccccagggcatgttgggccccacacttcagggccgaccagaagcctctgcatcccctggcctttcgcctcttgcatgcacctgctaaatggttttgtgtattatattctatataggcactaacaattatgaaaaatttggagggttttgcttgttttctgtttttctttttctttttttttaatttggaaagacttttcatcttgggtggagagatggtgtttattttgttttgttttgtttaaacaaatttctgctatatttattgagatctgtattattctacccgggaatgctgcatcattttaattttattattgtatatatttccattgtgttgattctccggtctcaagatgtctgctggatgttgatcatttcctctttccctgaagtaacaaaacactgtgtgtatgtcatatatacacgcatagatgtgtgcgcccataggggtacattccacattcgtgagcacacacccatacacattagataagggtggttcattatggatga

SEQ ID NO: 7699 - DNA, 916 bp, Homo sapiens
gggggagaggtagagatgagacaagaggtagaggggagaggtagaggtagccacgagctgataattacagacaagagatgcggagtatgtgggggctcattatcctgcatagtctatctttgtatatctttgaacttttcaagaataaaaaagcttaaaaagtatacatggcctggtcctaccagagactcacccaatgccagcctccagccagggagagccaagtttgcattttcacacgcatctcacactcctctgcactctcaacttggagcgctccaaacagggaaaccccaagccttgctggcttctgccaaccccctgagcagaagcatgggtccccctgatcaccacctcaccaccctcatcctgatctcactggagactccctttcccggtctgctaagtagcgggtgttttccttgacactaacgctacagctagaccacggtgggcttggcaacaggtgtcttcccagatgctggcgttaccgctagaccaaggagccctctggtggccctgtccgggcataacagaaagcttgcactcttgtcttctggtcactcctcactgtcccctcagctcccatctctgtatggcctggtttttcctaggttatgattgtagagcgaggattattataatattggaataaagaataattactacaaactaatgattaatgattcatatataatcatatctcagatctatatctagtataactattcttattttatatattttattatactggaacagctcgtgccctcggtctcttgcctcggcacctgggtggcttgctgcccacatccaccaagtgcactttgggaggctgaggctggaggactgctggaggccaggagttcaataccagcctgggcaacatagggagacccccccccccaccatctcc

SEQ ID NO: 7700 - DNA, 4247 bp, Homo sapiens
ggcaagagcagcgaccgcggcacctgtccgcccggagctgggacgcgggcgcccgggcggccggacgaagcgaggagggaccgccgaggtgcgcgtctgtgcggctcagcctggcgggggacgcggggagaatgtggactgggtagagatgaacgagacttttctcagatgttggatatttgcttggaaaaacgtgtgggtacgaccttggctgcccccaagtgtaactccagcactgtgaggtttcagggattggcagaggggaccaaggggaccatgaaaatggacatggaggatgcggatatgactctgtggacagaggctgagtttgaagagaagtgtacatacattgtgaacgaccacccctgggattctggtgctgatggcggtacttcggttcaggcggaggcatccttaccaaggaatctgcttttcaagtatgccaccaacagtgaagaggttattggagtgatgagtaaagaatacataccaaagggcacacgttttggacccctaataggtgaaatctacaccaatgacacagttcctaagaacgccaacaggaaatatttttggaggatctattccagaggggagcttcaccacttcattgacggctttaatgaagagaaaagcaactggatgcgctatgtgaatccagcacactctccccgggagcaaaacctggctgcgtgtcagaacgggatgaacatctacttctacaccattaagcccatccctgccaaccaggaacttcttgtgtggtattgtcgggactttgcagaaaggcttcactacccttatcccggagagctgacaatgatgaatctcacacaaacacagagcagtctaaagcaaccgagcactgagaaaaatgaactctgcccaaagaatgtcccaaagagagagtacagcgtgaaagaaatcctaaaattggactccaacccctccaaaggaaaggacctctaccgttctaacatttcacccctcacatcagaaaaggacctcgatgactttagaagacgtgggagccccgaaatgcccttctaccctcgggtcgtttaccccatccgggcccctctgccagaagactttttgaaagcttccctggcctacgggatcgagagacccacgtacatcactcgctcccccattccatcctccaccactccaagcccctctgcaagaagcagccccgaccaaagcctcaagagctccagccctcacagcagccctgggaatacggtgtcccctgtgggccccggctctcaagagcaccgggactcctacgcttacttgaacgcgtcctacggcacggaaggtttgggctcctaccctggctacgcacccctgccccacctcccgccagctttcatcccctcgtacaacgctcactaccccaagttcctcttgcccccctacggcatgaattgtaatggcctgagcgctgtgagcagcatgaatggcatcaacaactttggcctcttcccgaggctgtgccctgtctacagcaatctcctcggtgggggcagcctgcccaccccatgctcaaccccacttctcccgagctcgctgccctcagatggagcccggaggttgctccagccggagcatcccagggaggtgcttgtcccggcgccccacagtgccttctcctttaccggggccgccgccagcatgaaggacaaggcctgtagccccacaagcgggtctcccacggcgggaacagccgccacggcagaacatgtggtgcagcccaaagctacctcagcagcgatggcagcccccagcagcgacgaagccatgaatctcattaaaaacaaaagaaacatgaccggctacaagacccttccctacccgctgaagaagcagaacggcaagatcaagtacgaatgcaacgtttgcgccaagactttcggccagctctccaatctgaaggtccacctgagagtgcacagtggagaacggcctttcaaatgtcagacttgcaacaagggctttactcagctcgcccacctgcagaaacactacctggtacacacgggagaaaagccacatgaatgccaggtctgccacaagagatttagcagcaccagcaatctcaagacccacctgcgactccattctggagagaaaccataccaatgcaaggtgtgccctgccaagttcacccagtttgtgcacctgaaactgcacaagcgtctgcacacccgggagcggccccacaagtgctcccagtgccacaagaactacatccatctctgtagcctcaaggttcacctgaaagggaactgcgctgcggccccggcgcctgggctgcccttggaagatctgacccgaatcaatgaagaaatcgagaagtttgacatcagtgacaatgctgaccggctcgaggacgtggaggatgacatcagtgtgatctctgtagtggagaaggaaattctggccgtggtcagaaaagagaaagaagaaactggcctgaaagtgtctttgcaaagaaacatggggaatggactcctctcctcagggtgcagcctttatgagtcatcagatctacccctcatgaagttgcctcccagcaacccactacctctggtacctgtaaaggtcaaacaagaaacagttgaaccaatggatccttaagattttcagaaaacacttattttgtttcttaagttatgacttggtgagtcagggtgcctgtaggaagtggcttgtacataatcccagctctgcaaagctctctcgacagcaaatggtttcccctcacctctggaattaaagaaggaactccaaagttactgaaatctcagggcatgaacaaggcaaaggccatatatatatatatatatatatctgtatacatattatatatacttatttacacctgtgtctatatatttgcccctgtgtattttgaatatttgtgtggacatgtttgcatagccttcccattactaagactattacctagtcataattattttttcaatgataatccttcataatttattatacaatttatcattcagaaagcaataattaaaaaagtttacaatgactggaaagattccttgtaatttgagtataaatgtatttttgtcttgtggccattctttgtagataatttctgcacatctgtataagtacctaagatttagttaaacaaatatatgacttcagtcaacctctctctctaataatggtttgaaaatgaggtttgggtaattgccaatgttggacagttgatgtgttcattcctgggatcctatcatttgaacagcattgtacataacttgggggtatgtgtgcaggattacccaagaataacttaagtagaagaaacaagaaagggaatcttgtatatttttgttgatagttcatgtttttcccccagccacaattttaccggaagggtgacaggaaggctttaccaacctgtctctccctccaaaagagcagaatcctcccaccgccctgccctccccaccgagtcctgtggccattcagagcggccacatgacttttgcatccattgtattatcagaaaatgtgaagaagaaaaaaatgccatgttttaaaaccactgcgaaaatttccccaaagcataggtggctttgtgtgtgtgcgatttgggggcttgagtctgggtggtgttttgttgttggtttttgttgctttttttttttttttttttttaatgtcaaaattgcacaaacatggtgctctaccaggaaggattcgaggtagataggctcaggccacactttaaaaacaaacacacaaacaacaaaaaacgggtattctagtcatcttggggtaaaagcgggtaatgaacattcctatccccaacacatcaattgtattttttctgtaaaactcagattttcctcagtatttgtgtttttacattttatggttaatttaatggaagatgaaagggcattgcaaagttgttcaacaacagttacctcattgagtgtgtccagtagtgcaggaaatgatgtcttatctaatgatttgcttctctagaggagaaaccgagtaaatgtgctccagcaagatagactttgtgttattctatcttttattctgctaagcccaaagattacatgttggtgttcaaagtgtagcaaaaaatgatgtatatttataaatctatttataccactatatcatatgtatatatatttataaccacttaaattgtgagccaagccatgtaaaagatctactttttctaaggg

SEQ ID NO: 7701 - DNA, 5427 bp, Homo sapiens
aaagcgccagctgaggggccgctgcgggtggagtgcggcggagtcggcctcgcgaccccagcttgatccgccgcctgctgcaccgcgcctccgccgcgttcctgcgcgtcccgagccccgacggccgcgtgagtcccgtccgtgcggggaaggcagggccgggtcggcgccgcctgtggagaggacccggcggccgggcctgcttggagccgggcgcggtggcagcggcggcagcggcggcgacttccgaggcccgggctagacagcgcagggccatggctgaggcggccccggccccgacatctgaatgggactccgagtgccttacatccctgcagccccttcctcttcctacacccccagcagcaaatgaggcacacctgcagacagcagctatctctctgtggacagtggtggccgccgtgcaggctatagagaggaaggtggagatccacagccggcgactcctacacctggaaggtcggacagggacagcagagaagaaactagccagctgtgaaaagacagttaccgagcttgggaaccagctggagggcaagtgggccgtgctgggaaccctgctgcaggagtacgggctgctgcagaggcggctggagaacttggagaacctgctgcgcaacaggaacttctggatcctgcggctccctccaggtattaagggagatatcccaaaggtgcctgtggcatttgatgatgtctccatctacttttccactccagagtgggaaaaattagaagaatggcaaaaggaactttacaagaatatcatgaagggcaactacgagtctctcatctccatggattatgctataaatcaacctgatgtcttatctcagattcaaccagaaggggaacataatacagaggaccaggcagggccagaggaaagtgagattcccacagaccccagtgaagagcctggtatttcaacatcagatattctgtcttggattaaacaagaagaagagcctcaggttggggccccaccggagtccaaggagagtgacgtgtacaaaagcacttatgctgatgaagagcttgtcatcaaagctgaaggccttgctagatcctcgttgtgccctgaggttccagtccctttctcttctccaccagcagcagcaaaggatgctttttcagatgtggctttcaaaagccagcagtctacatccatgacaccttttggacgtccagccactgacctgcctgaagcctctgagggacaagtgacttttactcagttgggtagctatcccctcccacctccagttggcgagcaggtgttctcatgccaccactgtggcaagaatctcagccaagacatgttgctgacccaccaatgtagccatgctactgagcaccccttaccctgtgcccagtgccctaagcactttactccacaggcggacctcagcagcacctcccaggaccatgccagcgagacaccccccacctgcccacactgtgccaggacttttactcacccatcaagacttacctaccatcttcgggtccataacagcactgagcgtcctttcccctgtcctgattgccccaagcgctttgctgaccaggctcgactcaccagccaccggagagctcatgcaagcgaaaggcccttccgctgtgcccagtgcggcaggagcttcagcttgaaaatcagcctcctgctccaccagcggggtcatgcacaagagcgccctttctcctgccctcagtgtggcattgacttcaacggccactcggccctgatccgccaccagatgatccacacaggcgagcgtccttacccctgcactgactgcagtaagagcttcatgcgcaaggagcacctgctgaaccaccggcggctgcacacaggcgagcggcccttcagttgtcctcactgtggcaagagcttcatccgcaagcaccacctaatgaaacaccagcgcatccacaccggggagcggccctacccctgctcctactgtggcaggagcttccgctacaaacagacactcaaggaccacctccgttcaggccacaatggaggctgtgggggtgatagtgacccatcaggtcagccacccaacccaccaggtcccctcataactgggcttgaaacttctggcctgggtgtcaacactgaaggtctagagaccaaccagtggtatggggaagggagtggagggggagttttgtaaatccaaatctctgtggcttcatgcttgtatatgctcacagcagggcacaaaatccaagagaaggtctgtgagccccatccaacacccacagtaattattatctggcacatcaatgaatttggggtcctatacacttgactagagacatgcttgtgttttggaatttcacacccttacaagaataccacattttgaaacccagaaagacctggaaaggagcccagcatgtccatcttttcaaagatacaacaaaagcagaagttacaagaatattgcggagaggttggaaagcaggatttaacctctagttctcttgttctcagagaacagcaggttgatagtagattatgtctctaggtagagacagatacatgagaagagcctccaaaactggaagcccatcataaggcatgagaatgtttaactataaagccttttattagttctttgatagctaagatggttgttggagaaagtgcttaagccactgtttatgttgctgcctcctctctcaaaaccagccaagatctgttcacacacctctgtggctgtctttccctgaaacatggtaactcaagactgcctgcctaggtttcttagattaattattcacataaattttgtttaatattggttgaacaagaaatctgactttaaaagattattaaggagaatattccttaactatactggcttgatttgaaacaggctcttattgccatttaaactgccagaaatctttgccaaggtcctggttaaaaaaattggaaacggttttcttagccccagctttaaaagctagagatctcagagaaatagctggcttaacaatgacagaacagcttaaaatttgtgcctacaccatgttctgagagtcgttcacatcaaattcttatcttttccaagccagtaagttggcttctccattcctggtgtctgatattcttgacaatcatcagcaacaaagatcacagcactttccagaagcatggagcttcagaaagtgccagtgaactcttggtcctcagtagtgagatgataacagtgttataatgcagcttccttgagccatcagagagagtgtatgttcaccctatctggctgtatcccattggcagtggacagattgaggaaattcctagatcactgagagctaagcaccatgcatagacaacagtttgttcttgcctgtgttgcttttagggactttgactaccacatgttcttttcttggggtgatttaatcacctgggagcatctgagtctgctcctaagtggctttgcaactgggcctaagttctgtttcctttatggatctcaaattttcatctgcacaatgaggctgttgaaaggaaaaaaagtgagcctctaggaattattcaaaaaaagtctgtgatacattccttttcctgccaaagttctgtctctgtctttggcttctgtccaggcaaagctaaataagacagcaaagtcaaagcagataaattcttgttgaaacttgactaaaatttatttgatttgttgttttactcccacttggaatcctgaggtagaagacagaatgcagaagtcttacatcttgggcaggaaactggtttattcctatactcttgtttcctctgcttcttcctgaggtctagaacaaggtctggaaatgtttagacaggatattttcttgatgaagtgataaggaaaggacccatttttttgctcatcacctagcccatccttcactctctctagttatgcataacaacactagaagaaggtgttagcccagctaactttgcttctgggaaggctatgtctgaacatgttgctctgtaggataatcacacttagaaaacatctgctccatgacattcacaataccagggaccatgggagacacaagaaatgtgtgtctgctgtcataacttacagtgaaaaagcccaataatacagaacaagacatgatgggcaataccctagcatattgggattaagagctttctagccagaatctggacctataccatgggaaaatttaggggtgctgggaatcccaaagccaaggttctggcttcattggcaacccactaggaacttgaatgtgagattcagctctagtttgcaccttgatttccccagtgaaaagggagaagagccaaagtattgtctaggtgctgagttcccttttctgagtggatttcaagcatttgccagggtatgctggaggagggactcctaaagtaggtgagatgtgggactaggtaacactttaaatacttttttactcaaagatttgccaagaacacagcttattagtgaaagagacctgtggattgaaatggctgcagatagatcccgcagtcccttctgaaaggaactgtgtagccagcagggacctaaactttggcaaaaagtgaacacaattcaaatacgaatgaaggaagagccctcagatggaacgaaaggcgatgtgcaaggccatcccagagagacggaagcaggtgcgatactaagcctcagcccaagaataaaagagagttcaactgttactcttttctttcatcaatcccctatcagttagaactgcaggccagttccaaagagtgtttgcttaagattcaaaagtgggtaagtaaaatggatcagtgggaaggataaggtgtccaacagaaagtgtggaggagaaactcttggcctatcaagtgctcctgagagaaaccatgcaatttaacacttcagttaaagaaatacatgagaactgcttgtcatgaccagacaagataggaaaggggaaaccccagaaacgtgctcttcatctgtcagccttttggaccaagaagctgtcactatcacacataagcaccattcccttagagtggatccaggtgttgactataaccagatttactctttgcttactaggttttccattgtcaccattggatgaacctctggtttagccacagttgtgaaaataaatggaagttggttgattgtctagaaagtgcaagaagatggccctgctccttttctgctgaacatttagtattggaaactcctacttcccttttcattaataatgtgtgcaagtttcctattagcggggaaggtgtggggctctgctgggcttctcttgagcatatctgagaagtgatgttcatgtctatctcaaccaggaccagaccctgtgacttactcggtaataacagtccacacaagcctcgttgatatt

SEQ ID NO: 7702 - DNA, 8964 bp, Homo sapiens
actctacccactcaggttgcccagagagcactttaggttctgactcgcgtggggcgcgaggtaccccgtggggcagctaggtgcctccaagaaaccccgccccagaggacccgcacgagttgctgccatttttcgctgaagcccctgccctggggctggtgttcttctctatgattctaccaatcgtcggcatttttttcctcccttctttctttttaggaaggcgctggggtgtgcggcggcaacggcggcggtgaagggatcctcttgtggtatctcctcgtgggttcctgtcttgaaggatttcttctccgcctcaactttatgttcaagtagcgctttgggggttgggttggttttcatagcccccacccccggccctctccttttaaagggtgtgtggagttcagaggatgggtggagagcgggcttggccggaactgaattggtagaggtaaaaggggaacggaggaccttaagctctggccacttcggcccagcgaacccactttatttttgtccaaggaaaagctgcaggggggaggattctttttaggaagtctactctgccggcccctgatttttgggttggatgcttgagagctttgtttcccttgttccgagagtggcccagctgggtctgaatcgactccctcccctttcgaccccctcctcattttccagcccggagaaataggggagtgggggcccaagaacgagaagacgagaacgcgtcgccctgcgctatgtcagaatggggcgggtgtgaggggaacagctctcttgcgatcagctcaggagtatgagcctcccggaggacggcatgagttctggacacttcaggagtcctcagctagtgacatggtcgatatggataaactcataaacaacttggaggtccaacttaattcagaaggtggctcaatgcaggtattcaagcaggtcactgcttctgttcggaacagagatccccctgagatagaatacagaagtaatatgacttctccaacactcctggatgccaaccccatggagaacccagcactgtttaatgacatcaagattgagcccccagaagaacttttggctagtgatttcagcctgccccaagtggaaccagttgacctctcctttcacaagcccaaggctcctctccagcctgctagcatgctacaagctccaatacgtccccccaagccacagtcttctccccagacccttgtggtgtccacgtcaacatctgacatgagcacttcagcaaacattcctactgttctgaccccaggctctgtcctgacctcctctcagagcactggtagccagcagatcttacatgtcattcacactatcccctcagtcagtctgccaaataagatgggtggcctgaagaccatcccagtggtagtgcagtctctgcccatggtgtatactactttgcctgcagatgggggccctgcagccattacagtcccactcattggaggagatggtaaaaatgctggatcaggtaagtaacaatattgcctctttcctggccttcctgaatctattcccttttagagtcatcctatctcctgtctcttttcacttcctccaattattcttgcacactgcttcaagagtaatctttcaaaagtactgttttttatgtctttttaatgcttaagaatgtacaatgagtcttgattagaccatgcttctcaaacaagtacaagtatgcatatctatcagtgacatatcaaacaacttcctggaacttccacattatttgatattaaataatttaagcattttatatttaaaatatgattatcttgtattacaaaatgcaaaatttaaaaacctgttaagataaaccacatgcttcaaaaatagttgaagcttactaaaggcatccaccctcggacttttcaggagaatgtgtttattttatgccattcagaatgctttggtgggaaagttgagaacaatatttctatctcaaacatacttagccagtattagctcctgcctctaccaatactttcccttttctcttccctacaaaagaagtaattgaaatattgtcatcttccctgtgttcttcctcatttggcatctatcactttccattttacttatttatttgcctgtatcacaagagtttgggcattattcacaactgaattgtaaattcctgaaaaataatactctatcttaatttttttatgtatgcctccagagaacttaacacagtgctaggagttgtcttgcaacagataatttgatgaacaaacaaacttgaaaatttgtccaagagagaattcaaatgctataatcttccattttattttatttttaaaataagttcagaattcagaaaggtataaattaagtctctcttccaccactatcccccaaccactagttttcctcccagaggtatatctgttttagtttgtaatcaggaatgatcaaggaaaattatgtggcctctaaagcaggctgataatgttttgcataaatcggaaaggccaaggggtggaaatgactaggaagcagatttcagcttactgtaaaagagtatctacccttgaaatttgatgccctgtactaaatgtaggaggctgaaaaacaacatactactaagcatcaagttgctgagactctgcactggtcttctgaatacaaatattattattgactagtggttaattgtggtaatgataagtgttcataatcttattttgagatgtgatatccattccatatatgaagggagagccaaacaaacaaaccaaaaaaaggaaacaaacaaaaaaggaaataaaattcctcgtgtgacagtttatgctgagataaaggcagtggtaacatcaaaggatggtttgaaggagctttgaatagtccccataatatcatcagtccatcagagccactctaaataaacaggataaattttaaatgtgctcaatgtggttccaagctaagggcattggcccaatggtgtctgtattagttcgttttcatgctgctgataaagacatactcgagactgggaagaaaaagaggtttaattggacttacagttccacatagctggggaggcctcagaatcatggtgggaggcaaaaggcacttcttacatggtggcagcaagagaaaaggaagaaagaatagcggaaagccctgataaacccatcagatctcatgagacttattcactatcatgagaatagcaggggaaaactggccaccatgattcaattaactcctcctgggtccctcccacaacatgtggaaattctgagagatacaattcaagttgagatttgggtgggggcacagccaaaccacatcagtatccaaaatggggggcttactaaaccttagggggcacatataaaacaattggagtgcaagaagaaagtatcaaaatttgtattttcttacccttaaaaattgacaggtaatattgtatgttttaatcatctatagcatgatgttttgaagtacatatgcattgtggaatggttaaatctagctaaataataaatgcattacctcattatcatttttgtggtgagagcacttaatgtccattctctttacaattttaataaataaaatgtatcatcattaactatacttgccttgctatacaatagatctcttgaaatgtattcctcctatctagctataattacgtatcctttgaccaatatctccccatccccctccccactagccaccccagcctctggtaactaccattctactctacttgcatgagattaacttttttagattccacatatgagtgagatcatgcactatttgtccttctgtgcctggcatatttcacttaacataatgtcctccaggttcatctatgctctcacaaatggcaggattttattctttgttataactgaataatattatattgtatatatatatatgtcacatttcatttattcattcatttgttgatagatattttaggttggttccacatcttggctgttgtgaataatgctgcactaaacagggatgcagttatcttttgggcatgtgattttatttcctttggatatatacccagaagggagattgccagatcatacggtagttctaattttaagtttttgaggaacctccatactattttccataaaggctataactagtttacattcccatcaacagtgtgtaagtgttcccttttctccacatactcaccagcacttactgtcttttgtcttttcgataatagtcactctaacttaagtgagatgacatactactttttgtttgttttcttataatgtatacaaaattgtaggataccgatacatgtatatcacatacatgcacaaacatgcacacctcaagatacatgcttaaaactttttagtgaatgatatgcaaagtatagagacaactcttttaaccaaatacttgttccccaccttatcaccacccccaagtttcttctctatagaaattttgaaggtttcactggatctaggagactgttgaccacctgattgagtttttaggaattagaaacatcaggggttgataataaggaatatttgacagcttctcccaacataggtggaaaggaaggttgtatcaagcacctactaggtggtaggtatacgtttcatctcattgacttatttctgtttaggagcacaaaggccaaggtggatgttctcacatctggactaatcctagaatttgattttaggacagccaggagctattcagtgagttcaattcaacacacacacacacacacacacgttgaaactaacttttcagctgaccctgtcctggtagctggagatagaaagatgaatcatacccagaccacatcctagagacactctcatttgataccactcatagtggtatcagaactcttcatactactcttactttaaaggcatttctgttccctgctatgcaaaaaaaaaaaataaaatgttattctcttccttccatgcaaatacacttctttcatcttgttttttatttctttatttttctgtcttgctgccacttcttaaggtgggacaaactgggaatcctgaaaatgattaaagaggcacatacatcttcagctcacactgctccctttctttgcttttagtgaaagttgaccccacctccatgtctccactggaaattccaagtgacagtgaggagagtacaattgagagtggatcctcagccttgcagagtctgcagggactacagcaagaaccagcagcaatggcccaaatgcagggagaagagtcgcttgacttgaagagaagacggattcaccaatgtgactttgcaggatgcagcaaagtgtacaccaaaagctctcacctgaaagctcaccgcagaatccatacaggagagaagccttataaatgcacctgggatggctgctcctggaaatttgctcgctcagatgagctcactcgccatttccgcaagcacacaggcatcaagccttttcggtgcacagactgcaaccgcagcttttctcgttctgaccacctgtccctgcatcgccgtcgccatgacaccatgtgagccgcacaggtcacactagagaagctgcgctggtatctttcctggtcgtgtgctgaggttgggacaattttttcctctttgacttcagcttgcatatggggttgaagcagcccactgagccaagttgaggagactggaggaaaagagagctggtctcccgtggggctcttcatattctaccttcacttctccactgtccagacccgtttttttcaacctccacatgggttgaattccagtgtggcacccatggctgccttcccatccccccctgctctgaaataggacatttttcctacagtaacaaaacaggaatcaaactcaaggctgtgaacaaacatacgctgctttattctttccaatttttctcttgttttctagaactcttatccatatgtttttaaaataagtacctaaaagtggtttgatagtgtcctaaacgacttttttaacttcctaaatggaaagagcataacaatgtagttgattggtaagatttacagggatttggtttctgagtttgaggcacattcccagtgaataagctgagtcccataccacactcaaaaggttttaataaatctaatcctatttcttcttaaagtttggttttcagacagtgctggtgcttctgcttcttaagttcatcaagggaatgaggagttcttgtccttctcctcctcttttttttcttttccactttctccttcaggattaaagattttgctgcacaattgttatttgttaggttaaatttggacaaatattcaaagcacacatagacatataagtaaggagaaaaatgttccaggagagtaggttgggcagtgacaggaacaaacagacctaggatgatcctgagaacaaatagaggggttcctttacttgtataggatatcaaaagtgctgttaatcacaaacctcattcaaatggcaggctgtcgagacagtgtcttgaggggctggctgtactgtttattttttcgtttacacaaagaagcaattgagtatattgcatgatgagaaatcacacactagggtcatgttatacagaagtaaggggttggaaaaatggaatgttgttcactccatggaattattggcattcattcctgtgtttcaaatgaaacatagatgcttttcatgaaaactgacctacaaaaagcaatttgatgttctgcaactgctatgaaaacctaagccatttattttagctgatagcagattgcataatatactcatttagctgcccaatcagattgttttataatattacctggggtacaaaatcctctgttcctggccctggaccacagatctacctccacatggcatatttcctttctggggtcaggggtaggggagggggctttgcatcacttgaatttagactcagcctctctttaaaagattgtctttatattgaacacctttttcttttcaaccctgcttgaatactttaggttactatttcctgaggctgtccattctcactatattgtagaattctagcaccaagaagggatcccgttaaccatctagtcctatccatccctcatattttacagatgagacaaatacgggtcagatttttttctccagatgtttctttgagcccttatacacctgcacgcttattctcctggggatcacataattttatttatttattttttgagagacggtttcactccatcacccaggctggagtgcagtggcgtaatcttggctcactgcaacctccgcctcctgggttcaagtgattctcctgcctcagcctcccaaatagcttggattacaggtgcgtgccaccacacctagctaagttttgtattattagtagagatggggtttcgccatgttggccaggctggtctcaaactcctgacctcaagtgatccccccacctcggcctcccaaagtgctgggatcacaggtgtgagtcaccacacctggccaggatcacattattaaaccaaattaaagtttatgtgattggttgcaatatttgtctaattttatatgttttcttcaggaaaactttagaactcaaaaatcatttacagctgattaaatagcaagtaaaatgtacttgtggtcattgccgtataacattaggcacacgcttctaacacttctataatatctagattttatttacctcattttaacttgcaatgtctgtctatctcatgaactctccataaatccaagaactgcctgtagttttcaaaatgacatgtgggtttttactgttatcattgttatttcgatagggctttttcctgattttgggtatacaagttccaaacttgcataataattgctaacgcactaggcgatatctagggccagtctgttaaaggggacctctaatgtagctataagacaggttggtaaagatgaactaacataagtttaagctaataattcagtagttgatgcagtatttcacagtagagcccgagcttactcatttttttcaaaatttggatcctgatactcctttttcagagttcagaactgaactgctcccctaagacctcagaatcttttgcattgagacatatgatctatttataaataaaggttatcaaatatcttgttgaactaattaggttgatcaaattaggatcccaaatattggggtccctgacatctgagcctttatctaaaaatgtttctgtaacataatgacagcctttatgtttgttaattgcctatagtaaagaagcaattttaagcctattctcatttccctctcccctacaaaaaatgataaaagctttccaattacttacatatgctctaacaagtgtctcaggattcattaacagaattttatagagtacagtaattcaaatatagcacagtacagagtttaccaaaaacacataaaactttgctagatagacagtgaggtggaaaggaactaaaatgtatctctcttgaatagcatttggggttcaattgaatttgttgtgtttacaacagcaaagcaccgttagcctggacagttgcttatggcatcgatagggttggataatattctgggatttgttgcagcagaattcctctatctgatgatcagcagttgaacataaacttcataattatagtaaaatttaggaaaaactatgagtgtgaagagtatgaactgattgggtagattaggcagagtgcattatgggcaagacaaaggttttcgatattaacttcttttaaaataaactttttattttcaaacagtttcagttttacagaaaaaatgtgaagctagtacagagaggtctcatttaccccacacccagtttctcctgttattagcatctcacattaatatgtggtatatttgttacaattaataaaacacattgatatgttaatatt

SEQ ID NO: 7703 - DNA, 1331 bp, Homo sapiens; identical to SEQ ID NO: 2376

SEQ ID NO: 7704 - DNA, 1017 bp, Homo sapiens
gctaatgaatgaatgtgatcatttaaaagaaagtctctttcagtatgagagagagaaaacagaaggagtagtggttgtgagacaacttcaacaagaagtggctgacagcgtaaaaaaattaacgacgttagagtctccactggaaggtatatcacgttgtcatattaatttggatgagacacaggcctcaaataagaaattatttcaagtgaaaagtcaaatataagaaactcctggaaatgacaataaatatgttaaatgtatttggaaatgaagactttgattgccatggagacttaaaaacagatcaactgaaaatggatattctgattaagaagctaaaacagaagtttgatgatcttacggcagagaaggaagctttatcttcaaaatgtgtcaatttggctaaagacaatcaagttcttcaacaggagtttttatctatgaaaaaagtacaacagcaatgtgagaaacttgaggaggataaaaagatgttgaaagaagaaatattaaatcttaagacacatatggaaaacaatagggtagaacttagtaaactacaagaatataaattggagctagatgaaaaggcaatgcaggcagtagaaaaattagaagaaatccatttacaggaacaagcacaatatgaaaaacaattagagcagttaagcaaggataatatggcttcactaaataaaaaggaactcacacttaaagatgtggaatgtaaattctcagaaatgaaaactgcttatgaagaggttacaaccgaattagaagaatataaggaagcctttgcagcagcattgaaagctaacaattccatgtcaaaaaaattaacaaaatcaaataagaaaatagcagtgatcagcatgaagctccttatggagaaagagcagatgaaatattttctcagtgctcttcctacaaggcgagacccagagtcaccttgtgttgaaaatcttactagtataggactcaacagaaaatatattccccaaacacccataagaattc

SEQ ID NO: 7705 - DNA, 1525 bp, Homo sapiens
agtcacttgctgaagactagcgaagtggagggggaaagcccgagggagctgcagactcgaccactgcgccctcccctcctctccctgcaaggagcccaaggtgtgatcctgccaggcgttcgttcgctgcatgaccttggccatccttccattcccctgggtgtgaattctcattggcaaagtagacgcaccctctgaagatggtgactccctcctgagaagctggaccccttggtaaaagacaaggccttctccaagataaatgcaaggaacgtgaagaaaaaataattttagtgtcatctgcaaatgaaattgatgttcgtccctgtcctcttaacccaaatgaacacaaaggcactataacttggtataaagatgacagcaagacacctgtatctacagaacaagcctccaggattcatcaacacaaagagaaactttggtttgttcctgctaaggtggaggattcaggacattactattgcgtggtaagaaattcatcttactgcctcagaattaaaataagtgcaaaatttgtggagaatgagcctaacttatgttataatgcacaagccatatttaagcagaaactacccgttgcaggagacggaggacttgtgtgcccttatatggagttttttaaaaatgaaaataatgagttacctaaattacagtggtataaggattgcaaacctctacttcttgacaatatacactttagtggagtcaaagataggctcatcgtgatgaatgtggctgaaaagcatagagggaactatacttgtcatgcatcctacacatacttgggcaagcaatatcctattacccgggtaatagaatttattactctagaggaaaacaaacccacaaggcctgtgattgtgagcccagctaatgagacaatggaagtagacttgggatcccagatacaattgatctgtaatgtcaccggccagttgagtgacattgcttactggaagtggaatgggtcagtaattgatgaagatgacccagtgctaggggaagactattacagtgtggaaaatcctgcaaacaaaagaaggagtaccctcatcacagtgcttaatatatcggaaattgaaagtagattttataaacatccatttacctgttttgccaagaatacacatggtatagatgcagcatatatccagttaatatatccagtcactaatttccagaagcacatgattggtatatgtgtcacgttgacagtcataattgtgtgttctgttttcatctataaaatcttcaagattgacattgtgctttggtacagggattcctgctatgattttctcccaataaaagcttcagatggaaagacctatgacgcatatatactgtatccaaagactgttggggaagggtctacctctgactgtgatatttttgtgtttaaagtcttgcctgaggtcttggaaaaacagtgtggatataagctgttcatttatggaagggatgactacgttggggaagacattgttgaggtcattaatgaaaa

SEQ ID NO: 7706 - DNA, 822 bp, Homo sapiens
gttgagggtagggaggggagttcctgttgttcctactcctgctcagtgattcctgcccatggtcctcataaggttcatgggggctgttgttgcaagatcatggtgggtccctgaagcccctctactgacctttgacactaaactcttcttttactcctgacaattcgcccaaacaacacagaaggcagagaactcttgcatctatttgccctttcagtctggtttagcaaccgccgtgcaagatggaggaagcaagctggggccaatcaactgatggctttcaaccatctcattcccggggggttccctcccactgccatgccgaccttgccaacgtaccagctgtcggagacctcttaccagcccacatctattccacaagctgtgtcagatcccagcagcaccgttcacagacctcaaccgcttcctccaagcactgtacaccaaagcacgattccttccaacccagacagcagctctgcctactgcctccccagcaccaggcatggattttccagctatacagacagctttgtgcctccgtcggggccctccaaccccatgaaccccaccattggcaatggcctctcacctcaggtaatgggactcctgaccaaccacggtggggtacctcatcagccccagactgattacgcgctctcccctctcaccgggggtctggaacctaccaccacggtgtcggccagctgcagtcagagactagaccatatgaagagcttggacagtctgccaacatctcagtcctactgtccacccacctatagcaccacaggctacagtatggaccctgtcacaggctac

SEQ ID NO: 7707 - DNA, 370 bp, Homo sapiens
tccaagctaagaaaatccctattgtttcctccctggctgatccacttgacacccctccagattctaaagaaggaatagtggtggagtcaaaccatgactcgcacatggcaaaagaacgggcccacagtacagcctcacattcttcttccaattctgaagatacagagatgtgatgaaaacaagcggctattgcagacggctaatttatgcttaacttaggaagagataaggttccttgagcaccaaagatgattcataactctgtataggtgacagctgcttataaaagcatcttagcagataagcctattaaaattgtgcttttgtaacaatgttgtggttgctagaataaataccattaacaaatgcc

SEQ ID NO: 7708 - DNA, 337 bp, Homo sapiens
taaaatgggcataagggctacacaagcctggcgtttggtgtgaggatgcggtgagaacatgggggttcgtgtcgaaggtgctgcctgcagtacctaccctggcctctgtaacggccatgctgcccacccccaggcagcggcacggtggactttgatgagttcctggtcatgatggttcggtgcatgaaggacgacagcaaagggaaatctgaggaggagctgtctgacctcttccgcatgtttgacaaaaatgctgatggctacatcgacctggatgagctgaagataatgctgcaggctacaggcgagaccatcacggaggacgacatcgaggagc

SEQ ID NO: 7709 - DNA, 532 bp, Homo sapiens
agagagaaaaagtaaaagaccgaagaaggaggctggagagaccaggatccttccagctgaacaaagtcagccacaaagcagactagccagccggctacaattggagtcagagtcccaaagacatgggcttgttagagtgctgtgcaagatgtctggtaggggccccctttgcttccctggtggccactggattgtgtttctttggggtggcactgttctgtggctgtggacatgaagccctcactggcacagaaaagctaattgagacctatttctccaaaaactaccaagactatgagtatctcatcaatgtgatcatcctcaggattttgtggcaataacaaggggtgggggaaaattgggcgcgagtctgtggcctcgtccccacccaaggctgggtcctctctaggggcctggcatttgagtgaggaagcgatggctgcagccgaacgagaaggtcaggaagaacgtggtgcccagctggcttagcctcacctttcaaaggttccctaagcaaatttcttctcaaaac

SEQ ID NO: 7710 - DNA, 6096 bp, Homo sapiens
gtcatgcatacattagagcctctgatgagtttgtctttggggactctggggctgtactacccagtgtcatcacaaattaccaggagaaattgcttccagctcacaatcacatctgcttttggcaagaactaatgcaccaagacttcaagttctaagcctctgttcagattttaattgcaattgatcaggtttatattattgtacctccagagacctcctagagccagaacccggctggcttgctgtttcctttagagcagcgcatatcattatttggtgttctggtggaggacttttctgatggcagaaattagtttctctgggttcatcaggacgggatgcttcaagatttaagtgcaagtgtcttctttccaccttgttcacaacacagaacgttagctcaggtacctgacaatgatgagcagtttgtaccagactatcaggctgaaagtttggcttttcatggcctgccactgaaaatcaagaaagaaccccacagtccatgttcagaaatcagctctgcctgcagtcaagaacagccctttaaattcagctatggagaaaagtgcctgtacaatgtcagatttcgccgccagctttctgaaccctgtaactcctttcctcctttgccgacgatgccaagggaaggacgtcctatgtaccaacgccagatgtctgagccaaacatccccttcccaccacaaggctttaagcaggagtaccacgacccagtgtatgaacacaacaccatggttggcagtgcggccagccaaagctttccccctcctctgatgattaaacaggaacccagagattttgcatatgactcagaagtgcctagctgccactccatttatatgaggcaagaaggcttcctggctcatcccagcagaacagaaggctgtatgtttgaaaagggccccaggcagttttatgatgacacctgtgttgtcccagaaaaattcgatggagacatcaaacaagagccaggaatgtatcgggaaggacccacataccaacggcgaggatcacttcagctctggcagtttttggtagctcttctggatgacccttcaaattctcattttattgcctggactggtcgaggcatggaatttaaactgattgagcctgaagaggtggcccgacgttggggcattcagaaaaacaggccagctatgaactatgataaacttagccgttcactccgctattactatgagaaaggaattatgcaaaaggtggctggagagagatatgtctacaagtttgtgtgtgatccagaagcccttttctccatggcctttccagataatcagcgtccactgctgaagacagacatggaacgtcacatcaacgaggaggacacagtgcctctttctcactttgatgagagcatggcctacatgccggaagggggctgctgcaacccccacccctacaacgaaggctacgtgtattaacacaagtgacagtcaagcagggcgtttttgcgcttttccttttttctgcaagatacagagaattgctgaatctttgttttatttctgttgtttgtattttatttttaaataataatacacaaaaaggggcttttcctgttgcattattctatggtctgccatggactgtgcactttatttgagggtgggtgggagtaatctaaacatttattctgtgtaacaggaagctaatgggtgaatgggcagagggatttggggattactttttacttaggcttgggatggggtcctacaagttttgagtatgatgaaactatatcatgtctgtttgatttcataacaacataagataatgtttattttatcggggtatctatggtacagttaatttcacgttgtgtaaatatccacttggagactatttgccttgggcattttcccctgtcatttatgagtctctgcaggtgtacaaaaaaaccccaatctactgtaaatggcagtttaattgttagaaatgactgtttttgcaccacttgtaaaaaggtatttagcgattgcatttgctgtttgttgttttattttgctttatatatgacttgcagaggataaccataaaatgggtaattctctctgaagttgaataatcaccatgactgtaaatgaggggcacaattttggactctggcgccaaactgagtcataggccagtagcattacgtgtatctggtgccaccttgctgtttagatacaaatcataccgtcttttaaatattttgaagcccatttcagttaaataatgacatgtcatggtcctttggaatcttcatttaaatgttaaatctggaatcaaaatgaagcaaaaaatatctgtctccttttcactttcttcagtacataaatacattatttaatcaataagaattaactgtactaaatcatgtattatgctgttctagttacagcaaacactctttaagaaaaatatccaatacactaaataggtactatagtaatttttagacatggtacccattgatatgcatttaaaccttttactgctgtgttatgttgataacatatataaatattagataatgctaatgcttctgctgctgtcttttctgtaatattctctttcatgctgaatttactatgaccatttataagcagtgcagttaactacagatagcatttcaggacaaaatagatgactcaaaccatttattgcttaaaaaatagcttacgccatgctatgctataagcagcttttatgcacattgacaaatgaagagtaagcttcagcttgctaaaggaaactgtggaaccttttgtaacttttggtgatatggaaaattatttacaaaccgtcaaagaatatgaggaagttgctgtatgacatagtgctggcactgatattatccatcatctctttttggacacttctgtaaatgtgattggattgtttgaaagaagatttaaagtttcaaagttttttgttctgtttttgctttgcatttggagaaaatattgaaagcagggtatgttgtttcattcaccttgaaaaaaccatgagtaaatggggatatagaatctctgaatagctcgctaaaagattcaagcaagggacatgaattttgttccatctatcaataatatccagaagaacaacttttttaaagagtctatagcaaaaagcaaaaaaaaaaaaaaattctaaacacaaagtcaaaataaacctattgtaaaagcatttcgtgatgagcatgaaaaagattgtttaaagatgatccccccagctacccattttccaaaactacacagatcacagctcatttctctaagtggagcagttatcaagaaacccaaacaccaaaattgctactcttcacatttaatcctacaaaaagtactccaatttcaaaatatgtatgtaacctgcgatttcaatgattgttgttcatatacatcatgtattattttggcccattttgggcctaaaaaagaaaactatgccttaaaaatcagaaccttttctccccactatgcttatgtggccatctacagcacttagaataaaaacagatgttaaaatattcagtgaaagttttattggaaaaaggaattgagatatataattgagatttggtgaaattgaaggagaaaatttaagtgagtctttaaaatatattctgaatgaaaactgtattgaggattcatttttgttccttttttttctttttctcttttctcctttttcttctttttaatagtctagttttagtcagtcagtgaggaagaattgggccatgctaacgttatcacaagagaacaatggcagaaatggtattagttatataatatttaaggacaaactatatgttttgctgttttaacgtagtgactcactgaactaaatacataattgaccaacattaagtgtatttccaatacagaagggttgaaaatattacattataaactcttttgaaaaatgtatctaaaattttttaagttctgttttgattccactttttggttgagtttttatgtttttgttttcaggtagattaataaatctggcagctgatttctgcaagattcttgtgttttgaatttctcattgaattggctactcaaacatagaaatcatttgttaatgatgtaatgtcttctctcagcttttatcttcactgctgtttgctgtctcttgatgatgacatgttaatacccaatagattaattgcaacaaacacttatactcaaataactaagtaaaaataatttttcttgttatgtccatgaaaagtgcttcagaataaaaatccacaagactgacagtgcagaacatttttctcaaatcatgggcggatcttggaggtctagtttcccgtagatgctgtaaccaattaccacaacttcagtaatttacacaaatttatcttatagttctggaggcagaagttcaaaagaagccttaagagactaaaaccaagatgtccttaggtctggttccttctggaggctccaggggagattcttccagctttcacttctagagtctgctgacattccttggctcctggctacatcacttcaatctctgcttccatggtcacatactcttctactatagtcaaatttccttcctgcctcttataaggatgcttgtgattacatttaggggatgctcagataatccaggacaatctctccatctcaagatccttaacttaatgacgtgtgccaagtccctttggctagataattattcataggtcccagggattaggacatggatgtaaggggtgagggcagggctgttattcagaacaccgcacggaggaggaagactgtgtagcaaagactctaattgatttactcaggaacagtggagttctgctgagggatctaggatttgaaagtactagagtttgcttttatttaccactgagatattttccccttattctgcataaataattttgaaaactttctatattaaatttcaactattccactaaaatgtctggtaatcacatcaagcctttagattattcaaatccttccccagcccccaggaaaacactaagtcatgaaacagaaaaacagaaggtatgataataatagtaataacagttaaatcagtggtctaatccagattttattttttaatacatttcttttggtgttaatatgggttactatgtgatcttatcatttgctagtgattattacttattaggtaagaacaatgtgtaaaatatgtctattactcaaaagaacaattgcaaaatgagtcaacttatctttatataaccaggaaagaaatatattgccagaagctacagaattttgccagatgatagggatttctaaaatgagccactttgtctatcatgcagccttttcagagcttgtaatgagaaaacattacagaggagaaggtcatttggatgtttgttacttggaatcctagaaaacaaaaactaaaatttaaaaataagaagtgagtaagctattttccatttgcgatttggtatggagaagagaggaaatagaattattaaaaaaatacaaattgggtaaaagtgatggtggaaaaaatataaagaaggcaaatgtacatattaagcaattctactaagaattggaaaaatcaagtttcaaaaagatggtaatagttgggcatgatactagaaaatttcacccagtttattcagagctcaactagtacttttaggacttctttttttatatacatgagactcactttgacatacttaaaaaaaaaacagtttatggaaagtacagtttaagaggagaatttgattagactaagtggatatctttatagaaatattaatgatttcagaattttcagttacaagtgtatataccgtggctattgtttatggattcatatgtaaggtagggtcttttttgcatatagactccagtattagttactttcattctaaaattatatttatgcttctatggggaagaaaatttttaattcacttggttgtattaaaattatacttacggtttgagaaaacatgctatgaaaatcatgattatagcaaattaaatatgctcaaaatttaaatctaaaataaaagcccagaaactg

SEQ ID NO: 7711 - DNA, 1025 bp, Homo sapiens; identical to SEQ ID NO: 6638

SEQ ID NO: 7712 - DNA, 581 bp, Homo sapiens
agttctaacctgctctgcaggaataacggtcctgcctcccgacactcttggcgaggtttttgtacagtttgctccgggagctgtttcttcgcttccacctttttctcccccacacttcgcggcttcttcatgctttttcttctcaccatttctggccaaaactacaaacaagacttcgcagatcgagcctgcgtgctgccgaagcagggcgccgagtccatgcgaactgccatctgatccgctcttatcaatgaagcagccgatcatggcggatggcccccggtgcaagaggcgcaaacaagccaatcccaggaggaaaaacgggtcatcaagattgtcagaaaaggcctggactacatgcctgtcccagcactagattgtggtgaactatgacaatgtagtggacacaggttctgaaacagatgaggaagacaagcttcatattgctgaggatgacggtattgccaaccctctggaccaggagacgagtccagctagtgtgcccaaccatgagtcctccccacacgtgagccaagctctgttgccaagagaggaagaggaagatgaaataagggagggtg

SEQ ID NO: 7713 - DNA, 709 bp, Homo sapiens; identical to SEQ ID NO: 6531

SEQ ID NO: 7714 - DNA, 759 bp, Homo sapiens
cttgagccgggcgagcgctgtgggccaagcaggggttgcagggtagtaggagtgcaggtgacttggggccgggagccagcaataggcagggttgtgggctgggcagtgtggaggggtatttccccccagtgctgggagaggctatggcaatctagatatggccttatcaatgaatgttaattaccaacggtaatgaacgattgactgcctcggctggggcgggtcggggactgctgtgtaagatgggcaggatcctgcgcgacacctgcccagatgtggctttctgattttacagatccgctgttgtaccaggggtctaatcaggcctgtgtctgcctccttcttgaatagcccagtgaattcatctaaacagccttcctacagcaacttcccactccaggtggccagacgggagttccagaccagtgttgtctcccgggacattgacacagcagccaagtttattggtgctggggcagccacagttggtgtggctggttcaggggctggcattggaaccgtgtttggcagcttgatcattggctatgccaggaacccgtctctcaagcagcagctcttctcctatgccattcttggctttgccctgtctgaggccatggggcttttctgtttgatggtcgccttcctcatcctcttcgccatgtgaggctccatgggggggtcaccggcctgttgctactgcaactccacaccattcttggtgctggggtgtgttaagctttaccattaaacacaacg

SEQ ID NO: 7715 - DNA, 575 bp, Homo sapiens
cagaaaataataaacactgctggaaccagtaatgcagaagtccccttggctgatcccggaatgtaccagctggacattacattaagaaggggtcaaagtttagctgctcgagatcgaggagggacgagtgatccatatgtgaagtttaaaatcggaggaaaagaagtttttagaagtaagataatacacaagaacctcaaccctgtgtgggaagaaaaagcttgtattctggttgatcatcttagggagccattgtatataaaggtatttgactatgattttggactacaggatgactttatgggctcagcctttctggatctgacacaattggagttaaacaggcccacagatgtgacccttactctgaaagatcctcattatcctgaccatgatcttggaatcattttgctctcagtcatccttacccctaaagaaggagagtccagggatgtgtttcagacccaaagtttacgcctatcagacctacacagaaaatcgcatctttggagaggaatagtcagcatcaccttgattgaagggagagacctcaaggccatggattccaacgggtt

SEQ ID NO: 7716 - DNA, 1199 bp, Homo sapiens
gcgcagacagtgctccagccgcgcgcgctccccaggccctggcccgggcctcgggccggggaggaagagtagctcgccgaggcgccgaggagagcgggccgccccacagcccgagccggagagggagcgcgagccgcgccggccccggtcgggcctccgaaaccatgaactttctgctgtcttgggtgcattggagccttgccttgctgctctacctccaccatgccaagtggtcccaggctgcacccatggcagaaggaggagggcagaatcatcacgaagtggtgaagttcatggatgtctatcagcgcagctactgccatccaatcgagaccctggtggacatcttccaggagtaccctgatgagatcgagtacatcttcaagccatcctgtgtgcccctgatgcgatgcgggggctgctgcaatgacgagggcctggagtgtgtgcccactgaggagtccaacatcaccatgcagattatgcggatcaaacctcaccaaggccagcacataggagagatgagcttcctacagcacaacaaatgtgaatgcagaccaaagaaagatagagcaagacaagaaaaaaaatcagttcgaggaaagggaaaggggcaaaaacgaaagcgcaagaaatcccggtataagtcctggagcgttccctgtgggccttgctcagagcggagaaagcatttgtttgtacaagatccgcagacgtgtaaatgttcctgcaaaaacacagactcgcgttgcaaggcgaggcagcttgagttaaacgaacgtacttgcagatgtgacaagccgaggcggtgagccgggcaggaggaaggagcctccctcagggtttcgggaaccagatctctcaccaggaaagactgatacagaacgatcgatacagaaaccacgctgccgccaccacaccatcaccatcgacagaacagtccttaatccagaaacctgaaatgaaggaagaggagactctgcgcagagcactttgggtccggagggcgagactccggcggaagcattcccgggcgggtgacccagcacggtccctcttggaattggattcgccattttatttttcttgctgctaaatcaccgagcccggaagattagagagttttatttctgggattcctgtagacacacccacccacatacatacatttatatatatatatattatatatatataaa

SEQ ID NO: 7717 - DNA, 525 bp, Homo sapiens
cagaagactctggacaagccacagtccctgctgttcgatataccaatccaagcctctacctaggcacatggctcctggttttgctgatccaatacagcagacaatggtgtgtacagaaaaactcctggttcctgtccctattctggattctctcgatactctgtggcactttccaatttcagactctgatccggacactcttacagggtgacaattctaatctagcctactcctgcctgttcttcatctcctacggattccagatcctgatcctgatcttttcagcattttcagaaaataatgagtcatcaaataatccatcatccatagcttcattcctgagtagcattacctacagctggtatgacaggtaggaaagcctggagtatggattggctgtatccttactctctcactcctctgaaagtgtcagaaagattttttattttattattttttttttgagatggagttttgctcttgttgcccaggctggagtgcaatggtgtgatcttggctcactgc

SEQ ID NO: 7718 - DNA, 1091 bp, Homo sapiens
cttcatgatgtttggtcgaagagtcatctgaaattttgaattcagtaaggtggctagaaagtttagggtattttgaaagatggtgattgaccttggactgaaccactattgaagatttatttgataataatttgtaagttttaactcagtacctcccttctgcttttatagttcaaggagcagggacaagttacaggaatgttctccaagcagcaatccaaaagagtctcaaggatccttcaaataacttcaggctccataatgggagaagtaaagaacaaagacttaaggaacagcttggcgctcaacaagaaccagtgaagaaatccattcaggaatcagaagcttttttgcctcagagcatacctgaagagagatacaagatgaagagcaagcccctaggaatctgcctgataatcgattgcattggcaatgagacagagcttcttcgagacaccttcacttccctgggctatgaagtccagaaattcttgcatctcagtatgcatggtatatcccagattcttggccaatttgcctgtatgcccgagcaccgagactacgacagctttgtgtgtgtcctggtgagccgaggaggctcccagagtgtgtatggtgtggatcagactcactcagggctccccctgcatcacatcaggaggatgttcatgggagattcatgcccttatctagcagggaagccaaagatgttttttattcagaactatgtggtgtcagagggccagctggaggacagcagcctcttggaggtggatgggccagcgatgaagaatgtggaattcaaggctcagaagcgagggctgtgcacagttcaccgagaagctgacttcttctggagcctgtgtactgcggacatgtccctgctggagcagtctcacagctcaccatccctgtacctgcagtgcctctcccagaaactgagacaagaaagaaaacgcccactcctggatcttcacattgaactcaatggctacatgtatgattggaacagcagagtttctgccaaggagaaatattatgtctggctgcagcacactctgagaaagaaacttatcctctcctacacataa

SEQ ID NO: 7719 - DNA, 923 bp, Homo sapiens
tgcctgcctgcctgcctctgtgtgtgtgtgagcgtgtgtgcgtgcgtctactttgtactgggaagaacacagcccatgtgctctgcatggacgttactgatactctgtttagcttgattttcgaaaagcaggcaagatgtccagcacaccacatgaccccttctattcttctcctttcggcccattttataggaggcatacaccatacatggtacagccagagtaccgaatctatgagatgaacaagagactgcagtctcgcacagaggatagtgacaacctctggtgggacgcctttgccactgaattttttgaagatgacgccacattaaccctttcattttgtttggaagatggaccaaagcgatacagaaccaagaatttaagaccaattggggaaaaaatgaatattaatggaaaatgctatcggcaggaccctcatcccccgttactttagcactgtgtttgaaggaggggtgaccgacctgtattacattctcaaacactcgaaagagtcataccacaactcatccatcacggtggactgcgaccagtgtaccatggtcacccagcacgggaagcccatgtttaccaaggtatgtacagaaggcagactgatcttggagttcacctttgatgatctcatgagaatcaaaacatggcactttaccattagacaataccgagagttagtcccgagaagcatcctagccatgcatgcacaagatcctcaggtcctggatcagctgtccaaaaacatcaccaggatggggctaacaaacttcaccctcaactacctcaggttgtgtgtaatattggagccaatgcaggaactgatgtcgagacataaaacttacaacctcagtccccgagactgcctgaagacctgcttgtttcagaagtggcagaggatggtggctccg

SEQ ID NO: 7720 - DNA, 747 bp, Homo sapiens
aatgggagaagtcatcaagctgggttagggctgtgctcccagggctggcttcggaggcaggagaaaatgcagaagtctccatggacgtttccctggcttaccgtgatgacgcgtttgctgagtggactgaaatggcccatgaaagagtaccacggaaactcaaatgcaccttcacatctcccaagactccagagcatgagggccgttactatgaatgtgatgtccttcctttcatggaaattgggtctgtggcccataagttttaccttttaaacatccggctgcctgtgaatgagaagaagaaaatcaatgtgggaattggggagataaaggatatccggttggtggggatccaccaaaatggaggcttcaccaaggtgtggtttgccatgaagaccttccttacgcccagcatcttcatcattatggtgtggtattggaggaggatcaccatgatgtcccgacccccagtgcttctggaaaaagtcatctttgcccttgggatttccatgacctttatcaatatcccagtggaatggttttccatcgggtttgactggacctggatgctgctgtttggtgacatccgacagggcatcttctatgcgatgcttctgtccttctggatcatcttctgtggcgagcacatgatggatcagcacgagcggaaccacatcgcagggtattggaagcaagtcggacccattgccgttggctccttctgcctcttcatatttgacatgtgtg

SEQ ID NO: 7721 - DNA, 863 bp, Homo sapiens
catctacagctccgtgatttcaaggcatccttcccacccgttcgtttttagctcggctgccgaacttcattgcacagttgagttttccttccagcagggtggatggggagcatcgctggctgacaggctggtcagaaaatgtgatgttctgaatcgtggattttcaggttacaataccaggtgggccaaaattatccttccaagattaatcaggaaaggaaacagtttggacatcccagtagcagttacaattttctttggggccaatgacagtgcactaaaagatgagaatcccaagcagcacattcccctggaggagtacgctgcgaacctaaagagcatggtgcagtacctgaagtccgtggacatccctgagaatcgagtcattctcatcacgccgaccccactttgtgaaacagcctgggaagaacagtgcatcatacaaggttgcaaactaaatcgcctgaactctgttgttggtgaatatgccaatgcgtgtttacaagtggcccaagactgtgggactgacgtacttgacctgtggaccctgatgcaggacagccaggacttctcatcttatttatcagatggactacatttgtctccaaaggggaatgaatttttgttctcgcatctctggcctttgatagagaaaaaggtctcttctctacctttgctgcttccttactggcgggatgtagcagaagcaaaacctgaattaagtctgctgggagatggagaccattagccaatcacaggagacccaaatctgcttgttatctacagaactcaaagttgtcaatacgtagaggtacgcttttttcctcaggcttaaacctttgccactgatattaataataaaa

SEQ ID NO: 7722 - DNA, 1768 bp, Homo sapiens
gctaatgcatgttttccagggtcgctcctggcttcgtaccccttatttgacactgacatgcccccccaccccccgttgtgtctcctctcccagatgctcaaggtgtcagccgtactgtgtgtgtgtgcagccgcttggtgcagtcagtctctcgcagctgccgcggcggtggctgcagccggggggcggtcggacggcggtaattttctggatgataaacaatggctcaccacaatctctcagtatgacaaggaagtcggacagtggaacaaattccgagacgatgattatttccgcacttggagtccaggaaaacccttcgatcaggctttagatccagctaaggatccatgcttaaagatgaaatgtagtcgccataaagtatgcattgctcaagattctcagactgcagtctgcattagtcaccggaggcttacacacaggatgaaagaagcaggagtagaccataggcagtggaggggtcccatattatccacctgcaagcagtgcccagtggtctatcccagccctgtttgtggttcagatggtcatacctactcttttcagtgcaaactagaatatcaggcatgtgtcttaggaaaacagatctcagtcaaatgtgaaggacattgcccatgtccttcagataagcccaccagtacaagcagaaatgttaagagagcatgcagtgacctggagttcagggaagtggcaaacagattgcgggactggttcaaggcccttcatgaaagtggaagtcaaaacaagaagacaaaaacattgctgaggcctgagagaagcagattcgataccagcatcttgccaatttgcaaggactcacttggctggatgtttaacagacttgatacaaactatgacctgctattggaccagtcagagctcagaagcatttaccttgataagaatgaacagtgtaccaaggcattcttcaattcttgtgacacatacaaggacagtttaatatctaataatgagtggtgctactgcttccagagacagcaagacccaccttgccagactgagctcagcaatattcagaagcggcaaggggtaaagaagctcctaggacagtatatccccctgtgtgatgaagatggttactacaagccaacacaatgtcatggcagtgttggacagtgctggtgtgttgacagatatggaaatgaagtcatgggatccagaataaatggtgttgcagattgtgctatagattttgagatctccggagattttgctagtggcgattttcatgaatggactgatgatgaggatgatgaagacgatattatgaatgatgaagatgaaattgaagatgatgatgaagatgaaggggatgatgatgatggtggtgatgaccatgatgtatacatttgattgatgacagttgaaatcaataaattctacatttctaatatttacaaaaatgatagcctatttaaaattatcttcttccccaataacaaaatgattctaaacctcacatatattttgtataattatttgaaaaattgcagctaaagttatagaactttatgtttaaataagaatcatttgctttgagtttttatattccttacacaaaaagaaaatacatatgcagtctagtcagacaaaataaagttttgaagtgctactataataagtttttcacgagaacaaactttgtaaatcttccataagcaaaatgacagctagtgcttgggatcgtacatgttaattttctgaaagataattctaagtgaaattt

SEQ ID NO: 7723 - DNA, 539 bp, Homo sapiens
actgcaagctccgcctcccgggttcacgccattctcctgcctcagcctccagagtagctgggactacaggcgcccgccatcacgcccggctaatttttttgtatttttaatagagacggggtttcaccttgttagccaggatggtctcaatctcctgacctcgtgatatgcctacctcggcctcccgaagtgctgggattacattctccaggcattcttacctgacgaccactcctgacagagaaagtgctcacagcctgtccttgtgtaactcctgagcatacctctaccatcaagctttgttacctaacagcttggctcttttgggaaatatagacaagctggaacccaggagcagttgggagttttaaagaatgccagcctttttaaagctttgatgtccagtgctatagaatcaagttactgtggaggtcaaaacaatttgagatacataagctggccttagaaaataaattgcctctaacttgtataagtcgaatgtccctgtttccagaatatggtgttcagtctgccacatg

SEQ ID NO: 7724 - DNA, 2054 bp, Homo sapiens
atgtttctaccacactataacaggagaaaaatacctttttaaaaatttgatcaggtatccatcgtatcagaataatgacatctgcccaattaaccaaataaaccctgtccacattgctatcccactagagatctcagaattacaacattcataattatctgcgtttatgtagtgcattttacttctcaaacagcttccatggttactattttgttaatgatactatcattcctaatactttctattccatgcctttgggtaaatgaaataaaaacaattatcccaacaaattacactcccctctgtcatgtcaatattggaattgtagctcacaggtgtttgcttacatcagtcatccagaaggaagaatgatagagaaaacttgtgctctgacactactgattcttacatagtggaacaatatctttcttgataatgaattgtagttattataaatcggtgatcacgtgaccctaaaggcacccaaataaatctttagtaaaataattctgatgacacaatgaatgaattatttttaaggcattttcttggactagcaatgtattcttagagtggcgactgaatgtgcatacctcaatgatccatgttttactcattctagggctccccaggccacccagggcaaccaggccctcctggacctcctggtgcccctggtccttgctgtggtggtgttggagccgctgccattgctgggattggaggtgaaaaagctggcggttttgccccgtattatggagatgaaccaatggatttcaaaatcaacaccgatgagattatgacttcactcaagtctgttaatggacaaatagaaagcctcattagtcctgatggttctcgtaaaaaccccgctagaaactgcagagacctgaaattctgccatcctgaactcaagagtggagaatactgggttgaccctaaccaaggatgcaaattggatgctatcaaggtattctgtaatatggaaactggggaaacatgcataagtgccaatcctttgaatgttccacggaaacactggtggacagattctagtgctgagaagaaacacgtttggtttggagagtccatggatggtggttttcaggtaggaaaggatatacctttttttaaataagtcacctctatatcctttgtattcttcctatatgttcatcacaaagcaaagttactaggttggtacaaacataattgcagtttttgctactgaaagtgatggcatgcaataaaaatattttcacacataaaatactcgtacataaaatatataaacagcccatattacaatatgcatacacatactacatgaatccctcgcgtgcagttacaactgaaatgtttgatctgttttatttgttccctattacagtttagctacggcaatcctgaacttcctgaagatgtccttgatgtgcatctggcattccttcgacttctctccagccgagcttcccagaacatcacatatcactgcaaaaatagcattgcatacatggatcaggccagtggaaatgtaaagaaggccctgaagctgatggggtcaaatgaaggtgaattcaaggctgaaggaaatagcaaattcacctacacagttctggaggatggttgcacgaaacacactggggaatggagcaaaacagtctttgaatatcgaacacgcaaggctgtgagactacctattgtagatattgcaccctatgacattggtggtcctgatcaagaatttggtgtggacgttggccctgtttgctttttataaaccaaactctatctgaaatcccaacaaaaaaaatttaactccatatgtgttcctcttgttctaatcttgtcaaccagtgcaagtgaccgacaaaattccagttatttatttccaaaatgtttggaaacagtataatttgacaaagaaaaatgatacttctctttttttgctgttccaccaaatacaattcaaatgctttttgttttatttttttaccaattccaatttcaaaatgtctcaatggtgctataataaataaacttcaacactcttt

SEQ ID NO: 7725 - DNA, 583 bp, Homo sapiens
gacacaaggagaggcttggagagagcagacgccttctggattcaagaagacgaggtgagctgaggctcacctgttactcggcctcccagaaagatggataggagaaatgactacggatatagggtgcctctatttcagggccctctgcctcccccggggagcctggggcttcccttccctccagatatacagactgagaccacagaagaggacagtgtcctgctgatgcataccctgttggcggcaaccaaggactccctggccatggacccaccagttgtcaaccggcctaagaaaaggctaataagttggtgaaatacctgttggttaaggaccagacaaagatccccatcaaacgctcagacatgctgagggatgtcatccaagaatatgatgaatatttcccagaaatcattgaacgagcaagctacactctggagaagatgtttcgagtcaatctgaaagaaattgataagcaaagtagcttgtatattctcatcagcactcaggaatcctctgcaggcatactgggaacgaccaaggacacacccaagctgggtctcctcatggtgattctgagtgt

SEQ ID NO: 7726 - DNA, 694 bp, Homo sapiens
agtcaaaggaaagccatagacaccaatgtattccaggagggcttgactccatcctagattcttcccatagcagttcttgaatgcatggctgcacgtgcacctctccccatttttggggtccttcattggggtcaggatgaatgaagacatcaagctcactttgaagagcaagattctgatttggacaggttcatccttctgctcatcacttgttccccttcaattgataccctctcgttgttgggttctgagaatttgaaaccttgctctgaattgaacatgaaaaagggccgtgtagccaacatcagggacagcagtgcttttctcagtgtgagtcttttaaaacttgccttacaggaccaggacgcccctacagggccatagatttctcacatcaaggacctgcatttgttacctggcaccggtaccatttgttgtgtctggaaagagatctccagcgactcattggcaatgagtcttttgctttgccctactggaactttgccactgggaggaacgagtgtgatgtgtgtacagaccagctgtttggggcagcgagaccagacgatccgactctgattagtcggaactcaagattctccagctgggaaactgtctgtgatagcttggatgactacaaccacctggtcaccttgtgcaatggaacctatgaaggtttgctgagaagaaatca

SEQ ID NO: 7727 - DNA, 750 bp, Homo sapiens
cagccccggagcccgggccagggtccacctgtccccgcagcgccggctcgcgccctcctgccgcagccaccgagccgccgtctagcgccccgacctcgccaccatgagagccctgctggcgcgcctgcttctctgcgtcctggtcgtgagcgactccaaacgaactgtgactgtctaaatggaggaacatgtgtgtccaacaagtacttctccaacattcactggtgcaactgcccaaagaaattcggagggcagcactgtgaaatagataagtcaaaaacctgctatgaggggaatggtcacttttaccgaggaaaggccagcactgacaccatgggccggccctgcctgccctggaactctgccactgtccttcagcaaacgtaccatgcccacagatctgatgctcttcagctgggcctggggaaacataattactgcaggaacccagacaaccggaggcgaccctggtgctatgtgcaggtgggcctaaagctgcttgtccaagagtgcatggtgcatgactgcgcagatggaaaaaagccctcctctcctccagaagaattaaaatttcagtgtggccaaaagactctgaggccccgctttaagattattgggggagaattcaccaccatcgagaaccagccctggtttgcggccatctacaggaggcaccgggggggctctgtcacctacgtgtgtggaggcagcctcatcagcccttgctgggtgatcagcgccacacactgc

SEQ ID NO: 7728 - DNA, 849 bp, Homo sapiens
cctgttcaggctcccagggctattatgcacattttctaaaatttcaggcatgttgatctttgcactgtgattactttttcatcaaaagccacacagagggatgtggagtgaccgtaatgtgagtgctgctggggcagggggtaccggccatcccggaggtgtgaggggcaggtacctggagcctggcttctggctacaccgggcactgcaccatgagctccccgtgacccgtgaggttgcccttcaaggcaagtgtacctgtcgcctggctctggccctttgctcaacccaatggccgctttgtggctgacaggcaagtggatgtagctggcacccttgggccagcccagcctccatttctccagctgtccccagagccaacgtgcctctcctttgcagtcacacggaagctctgcagcctggacaacggggactgtgaccagttctgccacgaggaacagaactctgtggtgtgctcctgcgcccgcgggtacaccctggctgacaacggcaaggcctgcattcccacagggccctacccctgtgggaaacagaccctggaacgcaggaagaggtcagtggcccaggccaccagcagcagcggggaggcccctgacagcatcacatggaagccatatgatgcagccgacctggaccccaccgagaaccccttcgacctgcttgacttcaaccagacgcagcctgagaggggcgacaacaacctcaccaggatcgtgggaggccaggaatgcaaggacggggagtgtccctggcaggccctgctcatcaatgaggaaaacgagggtttctgtggtggaaccattctgagcgagttctacatcctaacgg

SEQ ID NO: 7729 - DNA, 2512 bp, Homo sapiens
tgctcttgggagcctttgaaaaaccacctctgacttgacctgggtttcctgttccccatgagtgctccagggctgcgcctaagcctgtgtcatggaactcaggggtgagccttggggttggcaccgggaccaggccatgacctctcttagtcatggagaattttccttggaaaattccttatctggcaacccagagggccccgcaccacacggagtcatatatgaagcactgatcacactgtgccctctaggcctgagtccctcatgtgatttaaggaaagtctctgttactccccagtctgcttccctgttctcagacaactaaagggatccagaggcactgcaacattcattcattcattcattcattcagcagttatttgccacgttcctgccttggccggaccctgtgccagatgctgggggcacagtggtgaactgccattgttgtggaggcttcagttcataaaagattgaactgtaaagtatataaagattgtaaagtatacaattctcattgaattgtatactttaaatgagtcagttacatggcatgtgaattacatctctataaaactggttttgaaagatgatgaatgtgtcgagagctgtgaaaggggaagccctagtggagtgggagcccgtgggctgctataggtaggggagttagagagactgctctgagcatgcgatgtcgaaagctgaagcatacgtggaaggtgccccggcgcaaggagtgaggggacagcactgtaggcagaagaaagagcatgggcttcggggcacacagatctggtgtgagtctcagccctgccctttgttcgctgtgtccttatcaggaatgatggccctcaatttagcccctgctgtgtgcaagcactatgctagatgtttacatgtctcaactcaaaatccccacaactccgtgaggtagactgaatgatgaccccaggtttacagacgtggaaagatactgaggcattaaataacctgccagtgatcctaggtctgtccgacccaagcctgtgtgtttaaccaccatattctacctcccaaaggactgtttcttctctatgtcgggtaatcacacctctgcgaggtgctctgaaacagcatctaaagagctccaggtttctctttcttccttattttctgagcttcaaggcctttatggattgaaagctggaagctaagaacggggctggatctgacactggtcctagtgttggggaagggcactgttgagtgatgggtcccatctcagctcttccttccctcccttccctctgccccattccctctgcctgctctgcccacctatctctagtaggacttccctgaccttctccctttatttccctgctttttaggggaaaatttgtcaattattttttgatccccaaagaactctacattttggagctttacatgtttatttagtacaacatattttaactgtggtgatagaaattcagactgtaggaagaatcactcagaatataaagttccttttagtaggaccctctcctctactcggcccttctccccacttcccttccatgctgggccggcagatgccatgcttctggggtctggtcattgaggcagataaccccctacttcagataacttggctgcattttttgtgtggctgacgcagccccaccggctgtctgcaaactccctgaaacaggatgacaggcgggtgtttcttgggcacgtgctgcggcgcagtcagctccacttgatgatgggtttggatgaacgggagaagaggggtggaaggggtgttgagaggggagaagaggccaggaggactttagattgtagttacatatgcacaatctgcccgttgttttagggacagatatgatgctgcttgaggactacacgtctgatgacaaccctccctctcactgcacttgcccacccaagagaaggagctcggtgacatttgaggatgaagtggaacaaatcaaagaagctgccaagaactcgattcttcatgtgaaagctgaagtacacaagtccttggacagttacgcagcaagcttggccaaagccattgaggccgaagccaaaatcaacttatttggggaggaggctttgccaggggtcttggttacagcacggactgtcccggggggcggcttcgggggccgccgaggcagcagaactcttgtgagccagaggctgcagttgcagagcatcgaagaaggagatgttttagctgccgagcagagatgagggcctcagggtgccgtggggctgcagcctgagaggctggcccggggaggagttcccatcaccgcctgtgccgcggccttgggagcatgtcactgtgtacagctggccacacacagggaaggagcagcatctggtatgcagccaccaggacaaggactgaaaataatgtctacagtccacagcttcagcatttccagagaccacatgtgagcttcttttaggtcccagtgatgggaccagaagcatctaaagcaaaaaaaaaacc

SEQ ID NO: 7730 - DNA, 4676 bp, Homo sapiens
cggtgcccgccgtggacttcggcaacgcgcaggaggcgtaccgcagccggcgaacctgggagctggcgcggagcctgctggtgctgcgcttgtgcgcctggcccgcgctgctggcgcgccacgagcagctgctgtatgtttccaggaaacttctaggacagaggctattcaacaagctcatgaagatgaccttctatgggcattttgtagccggggaggaccaggagtccatccagcccctgcttcggcactacagggccttcggtgtcagcgccatcctggactatggagtggaggaggacctgagccccgaggaggcagagcacaaggagatggagtcctgcacctcagctgcggagagggatggcagtggcacgaataagcgggacaagcaataccaggcccactgggccttcggggaccgcaggaatggtgtcatcagtgcccgcacctacttctacgccaatgaggccaagtgcgacagccacatggagacattcttgcgctgcatcgaagcctcaggtagagtcagcgatgacggcttcatagccattaagctcacagcactggggagaccccagtttctggtaagtgctagaaccttccacctgcagagtctggtgctgtgcgagatctcagggcagctgtgggcatccaccaaaaacacaggtgcccatgccttagaggcctgagctggccacaggggctgtgtgggggactggggtgggcaggggcgtgtgcagatggcattcaggcctgcgtttgcagctgcagttctcagaggtgctggccaagtggaggtgcttctttcaccaaatggctgtggagcaagggcaggcgggcctggctgccatggacaccaagctggaggtggcggtgctgcaggaaagtgtcgcaaagttgggcatcgcatccagggctgagattgaggactggttcacggcagagaccctgggagtgtctgggtgagagcagcccccaggctgagaggacacgagcatcagccatggttccagccaagccccagtgacgtctcccagtcctggctgccctgcctgagagggtgggccctgggatgacagtgctgaaggaactgcttttcacacagcaggacttgatggcttcaggagtccctgaggctggggctgggctgggcaggggagacacagggccagcacagaccccatagagggctctttatagaattatctgggtccagagcaaaggtggcactctcagccctccctggagtccacgccggcaggtgaaggatcagagccccatgccccatccttggagccaggggctgggacccagatcaccaggagcctccagttgaagtggggaggtgactggggtggtgcagtagtgagccatcccctcacacactgccagccttgcccactgtgtcctccctggccgcccggagctgtgtccgcctcctgcctggctgcctgtgctcggcccctccacaagcccaaaacagcctagggtactcagtgttttcagagccgcctagatgcaggactgtttgtgttttggttttaaatttatttaattaatttattttttatagagaccaggtctcaccatgttgcccaggctggtttcaaacccctgggctcaagtgacctgcccgccgcagcccccaaagtgctgggattataagtttgagcccccgcatgccactggttttaaatttttaaacagaaaacaatatttatatttcctctgtcttttaaaactgaacaccgaggtgggttttgtggtgggtggtgaacggacaggtttgggcctcgatcccccacccgaccctagcacccacaggtgggggtgccccctctgctgatgcgcctcctccctcagcaccatggacctgctggactggagcagcctcatcgacagcaggaccaagctgtccaagcacttggtagtccccaacgcacaggtaacacctccgctcctcagtgaggcccagctcagcagggcgctgcgctaagaagggaattcagcctgccacgtgtgtctcttgttgcctaccctgggaacttaacatgaccaaaatcactgcacactatggccccacagaccccctgtggtccagggggaagaagacaagcccactagtgtccacagagtgcttggcgggacagagacccacgcggagccttaagacaccacaaggagagggggtctgggggccttccccaagtcatctgtcttgtgcatcaggtcaccccaaacttcagaggcctgaaacggcagcagccactctgcttctgcctcatggttctggggttgacagggctcagctgggcagtcctcccctggggtctcctgggtagctgtactcacagagtggtggcgctgggacctgggggaggcacccattcacatgtctgggagttggtgctggctgtggcttgggctttttcccaacatggcagctgggctctaagggccagtgtcacctgagacgtgagagccaggcagaagctgggtgaccttttcctgcctcgcctcagaagtcacacggtgtcttttctggcaagttctgtttgttagaagcatgtcaccaggccagcctgtatacagcggggagaggaatgagactcatctgcctgtgggaggggggcccaggacctggcagactgcttgaaaccacagcttaaactgggattcaaagaaagaacagaagcaccttcagaaaacatcctgcagaggcagctttccatgacacatctagccccagtccactaagggcccagcctcaaacttagagcccccgacccagagcctcggggcgcagtgcgtacagtgtggctgtgcaccaaggccaccagctgttggagactttagcatggtgtagcaagggatagagtggtactgtttgtgcccagtgaggcaaggctgctggggccagcaaaggggtgagcgggaggccctgcgggatgggtccccacggcctctgagcaccagcaacttgaaggcctcatcctggtggttgccctggtccctggctacgtgtcagcacgtgctgcacaactgccctgtctgcctgtagccaggggtcttcctcctgggccctctgcctgctccgggtggagcccttctgtttgacgattgggtgatcagtgttcacttgttcaatgtcacatgggagttgcagggggctctcccacaacggtggggcctctgtgggaactggggagtacacacttcggagtgcaggcctggactgagcctggggcccactgacatgggcactgagctccctcgtggtacccctaggccccgcatagggcagtgcactggctgcgttggaggttcaggggcactgtgctgcttgtccaggtggccctccctcccagccctgcacagacgggtgagagggttcctgtgggctgggaatactgagagaggtttagcctgggcctcagggtggcactttcccgcccttgctgtggcctgaccgcgtgttgcacccccagacaggacagctggagcccctgctgtcccggttcactgaggaggaggagctacagatgaccaggatgctacagcggatggatgtcctggccaagaaagccacagagatgggcgtgcggctgatggtggatgccgagcagacctacttccagccggccatcagccgcctgacgctggagatgcagcggaagttcaatgtggagaagccgctcatcttcaacacataccagtgctacctcaaggatgcctatgacaatgtgaccctggacgtggagctggctcgccgtgagggctggtgttttggggccaagctggtgcggggcgcatacctggcccaggagcgagcccgtgcggcagagatcggctatgaggaccccatcaaccccacgtacgaggccaccaacgccatgtaccacaggtgcctggactacgtgttggaggagctgaagcacaacgccaaggccaaggtgatggtggcctcccacaatgaggacacagtgcgctttgcactgcgcaggatggaggagctgggcctgcatcctgctgaccaccgggtgtactttggacagctgctaggcatgtgtgaccagatcagcttcccgctgggccaggccggctaccccgtgtacaagtacgtgccctatggccccgtgatggaggtgctgccctacttgtcccgccgtgccctggagaacagcagcctcatgaagggcacccatcgggagcggcagctgctgtggctggagctcttgaggcggctccgaactggcaacctcttccatcgccctgcctagcacccgccagcacacccttagcctccagcaccccccgcccccgcccaggccatcaccacagctgcagccaaccccatcctcacacagattcaccttttttcaccccacacttgcagagctgctggaggtgaggtcaggtgcctcccagccctgcccagagtatgggcactcaggtgtgggccgaacctgatacctgcctgggacagccactggaaacttttgggaactctcctcgaatgtgtgggcccaaggcccccacctctgtgacccccatgtccttggacctagaggattgtccaccttctgccaaggccagcccacacagcccgagccccttggggagcagtggccgggctggggaggcctgcctggtcaataaaccactgttcctgc

SEQ ID NO: 7731 - DNA, 1014 bp, Homo sapiens
gcaggttagagcctggcaatgccgtttgggtgtgtgactctgggcgacaagaagaactataaccagccatcggaggtgactgacagatatgatttgggacaggtcatcaagactgaggagttttgtgaaatcttccgggccaaggacaagacgacaggcaagctgcacacctgcaagaagttccagaagcgggacggccgcaaggtgcggaaagctgccaagaacgagataggcatcctcaagatggtgaagcatcccaacatcctacagctggtggatgtgtttgtgacccgcaaggagtactttatcttcctggagctgtgagtgtgggtctggggacccaagattccccagcgcccagggctttcacctgtcccaccctctgcagctaaggaaaccccctttctggacccttggcgtcccaggtccctgtgccttgctcagccagctgcctggcgtaggcagctcacccaagtgctcctgccctacccctgattctgcccacgccaggctcaggggctggtgtccctcagggccacggggagggaggtgtttgactggatcctggaccagggctactactcggagcgagacacaagcaacgtggtacggcaagtcctggaggccgtggcctatttgcactcactcaagatcgtgcacaggaatctcaagctggagaacctggtttactacaaccggctgaagaactcgaagattgtcatcagtgacttccatctggctaagctagaaaatggcctcatcaaggagccctgtgggacccccgagtatctgggcaagcagggggtggggcaggggcagggggataatggggggcagccttcagggagctgctctgggcagggggaaaatgtgctcatctcaggaagctggtgtggatggtactggacctggctaggcctgatactgaccagcagatgggcgctgtgtttgtagccccagaggtggtaggccggcagcggtatggacgccctgtggactgctgggccattggag

SEQ ID NO: 7732 - DNA, 589 bp, Homo sapiens
gggacccacgtgtgtttcgcttgacactttatctttggtttctagccagggaagggctggctcataagtaggcgctcaagaaattcctggagtcagtttgtatctgtgtagggggagggcgttgctggttgagatgctcatattcagatttggactgtggaaggcttggggaggacacgcaagtctgactgtaatttggcacatgagcttttctcacggcagccccattctgttttgggctccccatgtttcctaaatgttctgttccccattgattgttgctgccgctcaccccaggttcccaaaggtgggggcctacccatgaccactgaagttctcaagagcttagcagctcctccagccctggagaagaagccacaggtggcctacaagacggagatcattggaggggtggtggtccacacacccatcagccagaacggtggggatgggcaggaagggagtgagcccgggtcccacaccatccttcgaaggtctcagagttacatccccacgtcaggctgccgtgcttccactgggcctcccctcattaagagtggttactgcgtgaagcaagggaatgtggtga

SEQ ID NO: 7733 - DNA, 1991 bp, Homo sapiens
taggttgtctcacgtggagggccatgttatgacttttatgttccccaggcacttgtgcctttgtggaacctttcattcattaatgaaagattaaaaattttattttatgattgcataggtacaaagatgaatatattaatatcctttgagctaagagttctcttttttcttctgagtctaaaagaagttaaaacattactatgggatatgaacactaagcactattgtgtctaatgcataagtcggccttggctgccaggccttctgttgcatcccatcagttaaatcaaggtacaggccaggttactgtgaagggactacgcagggctacctaccaggaagtagggttcactgggggccatttttggagattagctatcacttttgatcagaacacagtttcaagaaaagatatgtcaacctgtatcctttaactcatgactttgtggaaatgataagaggaaagtatagttttctgatgtaatcgagaaggtagatttaccagctgtcacaactgggctatgaactgaacttacattgggcaataatattctttgttcccagaaatttcactgcagtttgttttgtgcagttgttgtgtttcatttaatttttttatattaatttacttattttcaggaaagtcagaaaaacctcagtaacctgggttttggtcaatctgtgcatatcaatgttgattttcaacctcctctttgtgtttggaattgaaaactccaataagaacttgcagacaagtgatggtgacatcaataatattgactttgacaataatgacatacccaggacagacaccattaacatcccgaatcccatgtgcactgcgattgccgccttactgcactattttctgttagtgacatttacctggaacgcactcagcgctgcacagctctattaccttctaataaggaccatgaagcctcttcctcggcatttcattcttttcatctcattaattggatggggagtcccagctatagtagtggctataacagtgggagttatttattctcagaatggaaataatccacagtgggaattagactaccggcaagagaaaatctgctggctggcaattccagaacccaatggtgttataaaaagtccgctgttgtggtcattcatcgtacctgtaaccattatcctcatcagcaatgttgttatgtttattacaatctcgatcaaagtgctgtggaagaataaccagaacctgacaagcacaaaaaaagtttcatccatgaagaagattgttagcacattatctgttgcagttgtttttggaattacctggattctagcatacctgatgctagttaatgatgatagcatcaggatcgtcttcagctacatattctgccttttcaacactacacagggattgcaaatttttatcctgtacactgttagaacaaaagtcttccagagtgaagcttccaaagtgttgatgttgctatcgtctattgggagaaggaagtcattgccttcagtgacgcggccgaggctgcgtgtaaagatgtataatttcctcaggtcattgccaaccttacatgaacgctttaggctactggaaacctctccgagtactgaggaaatcacactctctgaaagtgacaatgcaaaggaaagcatctagacagtaaaacttacctgttgtggtctttttaatcacctcgtttgagttttatctgtttctctcctttatttcccagtcctctcagaaagtcttcctcaatgtattttgctcaggattaagaattagataaaacctgttgtttattattattcggcataatggacttggtagtttttctatttttcaatagatttgtacttgaataaggtgaagaatttcacacaacatacaagagtaccattgttccttatatcgttaaatctttgtgacacactttgacaaaaatgtagaacctataacaaattcttttacaagttactataaaggacacaaagag

SEQ ID NO: 7734 - DNA, 1030 bp, Homo sapiens
agagcgcttggagccagcgctgcagggagatagcagcgcgcagcccgcagaggcgctgcggcccgtgcagccccggaggcccctcgcggagaaggcggcggcggaggagaggccgagttaccgcccgccgcccgcgcccccccaaccccgccgccgccgccgccgccgccactgccccccctccccgcggcgccgcatcttgaatggaaacatggcggtgccggctcggacctgcggcgcctctcggcccggcccagcgcggactgcgcgcccctggcccggctgcggcccccaccctggccccggcacccggcgcccgacgtccgggcccccgcgcccgctgtggctgctgctgccgcttctaccgctgctcgccgcccccggcgcctctgcctacagcttcccccagcagcacacgatgcagcactgggcccggcgtctggagcaggaggtcgacggcgtgatgcggatttttggaggcgtccagcagctccgtgagatttacaaggacaaccggaacctgttcgaggtacaggagaatgagcctcagaagttggtggagaaggtggcaggggacattgagagccttctggacaggaaggtgcaggccctgaagcagctcctgacattcccaactgggaagctctcagagatgggccattctccaagccccaaatgggctcagccctggccgaaggagggacaaggaagaatcagtccccaacatgacctcaagaaaatctggtgcagagtggccacctctgtaaatcagctgatgcctgcaccactgtaaccacagctgttgacaggctgcagggcagaagctaagcaggaagaggcccagagcagagggcaagtgagcacggcagtaagaagttgaaaaccattaattgtccgtccagaggaggcggatgcccacaacattctgggcaaaggagatggtgtgtgcaaaagcacggaggtgtgagaatatagcatagtagacattcatcattcctttctcatgcactggagtgtctgtgcagccagg

SEQ ID NO: 7735 - DNA, 680 bp, Homo sapiens
ggaaaagggaagttctccaactgagttgctctctgaagctatcccggtgaccagcaagcactcatcctgcttctagaagtcaacaaggatacactgaacctgcttctgatttctttagggtcgacaagtgcccccaatgatttatggtacaacttcattgaactgccctaccacggggaaagcatcagcatgctgattgcactgccgactgagagctccactccgctgtctgccatcatcccacacatcagcaccaagaccatagacagctggatgagcatcatggtgcccaagagggtgcaggtgatcctgcccaagttcacagctgtagcacaaacagatttgaaggagccgctgaaagttcttggcattactgacatgtttgattcatcaaaggcaaattttgcaaaaataacaaggtcagaaaacctccatgtttctcatatcttgcaaaaagcaaaaattgaagtcagtgaagatggaaccaaagcttcagcagcaacaactgcaattctcattgcaagatcatcgcctccctggtttatagtagacagaccttttctgtttttcatccgacataatcctacaggtgctgtgttattcatggggcagataaacaaaccctgaagagtatacaaaagaaaccatgcaaagcaacgactactttgctacgaagaaag

SEQ ID NO: 7736 - DNA, 4638 bp, Homo sapiens
cctcctcctcctcctcgcacggtaatgggaggctcctaggcaggagaagcaaaagaaggaattgtttgcgagttcagtcatccaaaaagcttcttccatatggagggaccgggtgcgctgggcgcggcgtcccctgcgttgtcctcctgctgccgcccccgcggccgccgctttctgccgcggggaccctgagccccggcccgccggtgtcagccgccgcgcgcgcgcacagacacacacacagagacacacaaacacacacagaaaagacacacacgcgcacacacggcgcgcacaccctcacgcccgccacagccacaacacgcccgcacgcgccctccctctccggcccgcaacttctcggtcctcggctcctttgttgctccagccgcggccgctcgcccgtgttgtgtgtccccggtgtcaccgagcgtgttgtgtgtccgtgcggcgcggcgctgtgtggctccctcgcgcccaccacgctggcccccgggccccggctcgcccttcccaggcgccggctgcagcagagtttcagaacaagcttcctggaacccatgacccatgaagtcttgtcgacatttataccgtctgagggtagcagctcgaaagtagaagaaagtgttgccagggacggcagtatctctttgtgtgaccctggcggcttatgggacgttggcttcagacctttgtgatacaccatgctgcgtgggacgatgacggcgtggagaggaatgaggcctgaggtcacactggcttgcctcctcctagccacagcaggctgctttgctgacttgaacgaggtccctcaggtcaccgtccagcctgcgtccaccgtccagaagcccggaggcactgtgatcttgggctgcgtggtggaacctccaaggatgaatgtaacctggcgcctgaatggaaaggagctgaatggctcggatgatgctctgggtgtcctcatcacccacgggaccctcgtcatcactgcccttaacaaccacactgtgggacggtaccagtgtgtggcccggatgcctgcgggggctgtggccagcgtgccagccactgtgacactagccaatctccaggacttcaagttagatgtgcagcacgtgattgaagtggatgagggaaacacagcagtcattgcctgccacctgcctgagagccaccccaaagcccaggtccggtacagcgtcaaacaagagtggctggaggcctccagaggtaactacctgatcatgccctcagggaacctccagattgtgaatgccagccaggaggacgagggcatgtacaagtgtgcagcctacaacccagtgacccaggaagtgaaaacctccggctccagcgacaggctacgtgtgcgccgctccaccgctgaggctgcccgcatcatctaccccccagaggcccaaaccatcatcgtcaccaaaggccagagtctcattctggagtgtgtggccagtggaatcccacccccacgggtcacctgggccaaggatgggtccagtgtcaccggctacaacaagacgcgcttcctgctgagcaacctcctcatcgacaccaccagcgaggaggactcaggcacctaccgctgcatggccgacaatggggttgggcagcccggggcagcggtcatcctctacaatgtccaggtgtttgaaccccctgaggtcaccatggagctatcccagctggtcatcccctggggccagagtgccaagcttacctgtgaggtgcgtgggaaccccccgccctccgtgctgtggctgaggaatgctgtgcccctcatctccagccagcgcctccggctctcccgcagggccctgcgcgtgctcagcatggggcctgaggacgaaggcgtctaccagtgcatggccgagaacgaggttgggagcgcccatgccgtagtccagctgcggacctccaggccaagcataaccccaaggctatggcaggatgctgagctggctactggcacacctcctgtatcaccctccaaactcggcaaccctgagcagatgctgagggggcaaccggcgctccccagacccccaacgtcagtggggcctgcttccccgcagtgtccaggagagaaggggcagggggctcccgccgaggctcccatcatcctcagctcgccccgcacctccaagacagactcatatgaactggtgtggcggcctcggcatgagggcagtggccgggcgccaatcctctactatgtggtgaaacaccgcaaggtcacaaattcctctgacgattggaccatctctggcattccagccaaccagcaccgcctgaccctcaccagacttgaccccgggagcttgtatgaagtggagatggcagcttacaactgtgcgggagagggccagacagccatggtcaccttccgaactggacggcggcccaaacccgagatcatggccagcaaagagcagcagatccagagagacgaccctggagccagtccccagagcagcagccagccagaccacggccgcctctcccccccagaagctcccgacaggcccaccatctccacggcctccgagacctcagtgtacgtgacctggattccccgtgggaatggtgggttcccaatccagtccttccgtgtggagtacaagaagctaaagaaagtgggagactggattctggccaccagcgccatccccccatcgcggctgtccgtggagatcacgggcctagagaaaggcacctcctacaagtttcgagtccgggctctgaacatgctgggggagagcgagcccagcgccccctctcggccctacgtggtgtcgggctacagcggtcgcgtgtacgagaggcccgtggcaggtccttatatcaccttcacggatgcggtcaatgagaccaccatcatgctcaagtggatgtacatcccagcaagtaacaacaacaccccaatccatggcttttatatctattatcgacccacagacagtgacaatgatagtgactacaagaaggatatggtggaaggggacaagtactggcactccatcagccacctgcagccagagacctcctacgacattaagatgcagtgcttcaatgaaggaggggagagcgagttcagcaacgtgatgatctgtgagaccaaagctcggaagtcttctggccagcctggtcgactgccacccccaactctggccccaccacagccgccccttcctgaaaccatagagcggccggtgggcactggggccatggtggctcgctccagcgacctgccctatctgattgtcggggtcgtcctgggctccatcgttctcatcatcgtcaccttcatccccttctgcttgtggagggcctggtctaagcaaaaacatacaacagacctgggttttcctcgaagtgcccttccaccctcctgcccgtatactatggtgccattgggaggactcccaggccaccaggccagtggacagccctacctcagtggcatcagtggacgggcctgtgctaatgggatccacatgaataggggctgcccctcggctgcagtgggctacccgggcatgaagccccagcagcactgcccaggcgagcttcagcagcagagtgacaccagcagcctgctgaggcagacccatcttggcaatggatatgacccccaaagtcaccagatcacgaggggtcccaagtctagcccggacgagggctctttcttatacacactgcccgacgactccactcaccagctgctgcagccccatcacgactgctgccaacgccaggagcagcctgctgctgtgggccagtcaggggtgaggagagcccccgacagtcctgtcctggaagcagtgtgggaccctccatttcactcagggcccccatgctgcttgggccttgtgccagttgaagaggtggacagtcctgactcctgccaagtgagtggaggagactggtgtccccagcaccccgtaggggcctacgtaggacaggaacctggaatgcagctctccccggggccactggtgcgtgtgtcttttgaaacaccacctctcacaatttaggcagaagctgatatcccagaaagactatatattgttttttttttaaaaaaaaaaagaagaaaaaagagacagagaaaattggtatttatttttctattatagccatatttatatatttatgcacttgtaaataaatgtatatgttttataattctggagagacataaggagtcctacccgttgaggttggagagggaaaataaagaagctgccacctaacaggagtcacccaggaaagcaccgcacaggctggcgcgggacagactcctaacctggggcctctgcagtggcaggcgaggctgcaggaggcccacagataagctggcaagaggaaggatcccaggcacatggttcatcacgagcatgagggaacagcaaggggcacggtatcacagcctggagacacccacacagatggctggatccggtgctacgggaaacattttcctaagatgcccatgagaacagaccaagatgtgtacagcactatgagcattaaaaaaccttccagaatcaataatccgtggcaacatatctctgtaaaaacaaacactgtaacttctaaataaatgtttagtcttccctgtaa

SEQ ID NO: 7737 - DNA, 570 bp, Homo sapiens
cattccaagtcgctgctgtgcagagcagcaagtgctccgtgcagggctgttgctatcacttggaggtgaacagcctcttttgccggtattcagtgaagaaagcaagtctaaatatgcagttctctcactggagtgaaagatgttttgttcatttctaatcaactatgctagacagctgcaagctgaaaagtgcctgcaatttgccatttatttgtaataagaccctgtatggtaagattggaaaggacagactaaatgcagtaaacaaaataataaacactgctggaaccagtaatgcagaagtccccttggctgatcccggaatgtaccagctggacattacattaagaaggggtcaaagtttagctgctcgagatcgaggagggacgagtgatccatatgtgaagtttaaaatcggaggaaaagaagtttttagaagtaagataatacacaagaacctcaaccctgtgtgggaagaaaaagcttgtattctggttgatcatcttagggagccattgtatataaaggtatttgactatgattttggactacaggatgactttatgggct

SEQ ID NO: 7738 - DNA, 655 bp, Homo sapiens
tctgaaaagaaacctgagccccagggaggcggcgcggagcgaccctggcagagctggcgcaaacagggcgagaggtcgctgggcagcgttcgaggaccagagggagctcggccacagaagaccccagtgatctgatcccgggatcccggctccaagctctcctcgcattttacagatttcacccccgcgactatctccccaaaacggagcctttatatcaagagaaggtgcgggagctggggcaaccaggactttctcgggcacccaagatgcgctccattaggaagaggtggacgatctgcacaataagtctgctcctgatcttttataagacaaaagaaatagcaagaactgaggagcaccaggagacgcaactcatcggcgcttctggtggaggagttgactcataaaaccatcaaatcatctcattgactgtctttctacccaagccacgtggagaggccagttttgagttttgagtaaactggaatggaggttcggctccagatcccggtccagtattcaagtgagagatggtgaattgtctttgagtcggtcacttgtcaatagctctgataaaatcattcgaaaggctggctcttcaatcttccagcacaatgtagaaggttggaaaatcaattcctctttggtccta

SEQ ID NO: 7739 - DNA, 3545 bp, Homo sapiens
agttctaacctgctctgcaggaataacggtcctgcctcccgacactcttggcgaggtttttgtacagtttgctccgggagctgtttcttcgcttccacctttttctcccccacacttcgcggcttcttcatgctttttcttctcaccatttctggccaaaactacaaacaagacttcgcagatcgagcctgcgtgctgccgaagcagggcgccgagtccatgcgaactgccatctgatccgctcttatcaatgaagcagccgatcatggcggatggcccccggtgcaagaggcgcaaacaagccaatcccaggaggaaaaacgtggtgaactatgacaatgtagtggacacaggttctgaaacagatgaggaagacaagcttcatattgctgaggatgacggtattgccaaccctctggaccaggagacgagtccagctagtgtgcccaaccatgagtcctccccacacgtgagccaagctctgttgccaagagaggaagaggaagatgaaataagggagggtggagtggaacacccctggcacaacaacgagattctacaagcctctgtagatggtccaggtaagtgtctaaaatcacttggcctcttcctgtaccatcttcacatcttcaactaatctgttccacctagcagatcgcccacaaccaaataattaaaatatttctttccattgagcccttgcagaatagagataccaaagctggtgacagattatgaagtgatagtaatgttatcacattgcggcagttacatcttaggaagggattatatttcagttttgatgcaagtcaaacatgaaccacactttcaacacataacatgaggtatttgcaccacatttacaatgtgcaaattatgtaacatgatcaagatctatactttcatgataggaaatggaagcaaatgtaaaaactcacaacatatatatgtatataaaaatattttgtgtggaaattatgtagcatttcaaaccaaataactgtcagtttaatgtagcttcagtgtctgtctgacacctcctattggaattcaatcgtttaatgattcccttttgttaagtgtgaatgtgatttcacacttttacctggtcaggtagctttcttattatttatcagctaagtacttgataatgattcctgctgtttggtgggactctcaagggaagtaaaaatggtcccaggccaactataataaaactaaggtaaattatattcaaactaaaacttccgacaacactgtgcaaacgggaaatgtcttggtctaaaattcacttatgacggagaatcgctaaggtatgaaatgtttaacaaaatacaagaaatcttattcctgtgaactttctctgctcatctttacatggtaaagtggcctggaaaatttgtttaaatgacctctctaattcagacctcatgtcaccttcatctctattcccaggacccactgagagttatcattgtttaccccaccttgttttttctttgacaacataagcaacaaaagcatttttataaataggtgaagtggctgggaaggagtctacctatatgctgttgtgatgtcgcagactataaaccatcaaacataggcagaataattgtttggtatactggaaggaggataataaaagcacttccactacgaaagaaaattaaatgtgagatgaaagaaaaagaaaaaagactgatggcaatttgagtacagtgtatttgtttttcgttttcctaacatactgtgccaagttttctactctttccgtttccaattttgctttcggtgaaggtttctcgaatctcagcaatcccacacataaacatttatcgttatatccattaagccttaaggttttagattttcaactatgagggagaactcagccaaagatgcttgaaagataaatacgtttaattaggggcagaggatgatcattaaaggaagtctgactgctgcagaagtcattaacaatcttaaatgaaatttttatttttatgatagccatttacatgtataataagagccaatgattcttgggagcagtgtgacagaaacagagtgtggcgagaactcatgtaagacatactatttaaatgagctggtgttagctattcatatttgttaatgaactagatatgcagggctataagaatgaatgttctgatgctttaaattttaatatctagaaatcaagggtaaggaccaattactagaatttccacccttagaagaataattaataacaatgtaacaaatgtacagccccaaacctcttttaaaaaagtttaatttaaaaaatttaatatcaatagttgaaaaacagccaaacagcaatgtcaagctgtagtagtttgtgattgtggcagctttttgtgttggtcatggatcataattctaaacgttttaatatacagtaatccatatgaatgcattgcagaccctgttatcacctgtagttaatggtgcctgtgatacaagtgaacaggctgttctttgctcttacctttatggtaaataaaccagcattctggagtcacaataattaaataaaatgtaaatccctaatctcatttggctatttggaccaagaaacttacccggctattacctgtctagttctaatgattactaatgatttattgttctttttttttattgttctaaaagtgctctgatgtggtgccttgatgtctaatgaaaagaaattggtcttaaaaagctactcattgtttatcctgactctgagataacacatttttcttctgataaaatatttttcttatttattgttcaaaacacacaatatagacaataactctaattctggtgcagttttatttagtagtgttttatccccggtgcctggctgtctacagtcatacctcagcacatagctttactctgagataagccctctctcctttgctctttctcccatgctttctggagtttgtctgcaggatgcaggttttgaactgaagagcgcagtggagttcttactgtgcctttccggttccagcacaatcaaagttttgtgtttggaattgtccttgacattctttcgtcccacaatggggtggacacagtgtgctggaaaccatgacatcattatcattgacacagacttaaataaatcacctgcatcttggcctctttctgcttattcaaggattcttcatcttaaggaagaaagtgctctttatttttacaaatcttcatcccaggggtgactggaagacgcaaacttttacaagtgttttaaaaataaatatactatgtggttttagacacagtatgctgagtcagaggtgtcttagagaatgtttaaggttagacataaggcagaaagacagccagattgcctttaattcggaggcaatattcctaaactgtgtatcattatgtccttctgaatatggattcacttgaaacttaattaaataggcatatacataacatttcaaatacatacctgaaaaggcttagtagtgtttcattttcacacattgagcttgatattcaaaaaagaaaaa

SEQ ID NO: 7740 - DNA, 767 bp, Homo sapiens
acagagttgtatctggatggaaaccaatttacactggttcccaaggaactctccaactacaaacatttaacacttatagacttaagtaacaacagaataagcacgctttctaatcagagcttcagcaacatgacccagctcctcaccttaattcttagttacaaccgtctgagatgtattcctcctcgcacctttgatggattaaagtctcttcgattactttctctacatggaaatgacatttctgttgtgcctgaaggtgctttcaatgatctttctgcattatcacatctagcaattggagccaaccctctttactgtgattgtaacatgcagtggttatccgactgggtgaagtcggaatataaggagcctggaattgctcgttgtgctggtcctggagaaatggcagataaacttttactcacaactccctccaaaaaatttacctgtcaagggctgccagggccctgtggcttcctcataccaggtcctgtggatgtcaatattctagctaagtgtaacccctgcctatcaaatccgtgtaaaaatgatggcacatgtaatagtgatccagttgacttttaccgatgcacctgtccatatggtttcaaggggcaggactgtgatgtcccaattcatgcctgcatcagtaacccatgtaaacatggaggaacttgccacttaaaggaaggagaagaagatggattctggtgtatttgtgctgatggatttgaaggagaaaattgtgaagtcaacgttgatga

SEQ ID NO: 7741 - DNA, 1313 bp, Homo sapiens
gcagtgcagcgcagccgcggggagcgaggagcgcgcggagccggccatgggcaagtcagcttccaaacagtttcataatgaggtcctgaaggcccacaatgagtaccggcagaagcacggcgtccccccactgaagctctgcaagaacctcaaccgggaggctcaacagtattctgaggccctggccagcacgaggatcctcaagcacagcccggagtccagccgtggccagtgtggggagaaccttgcatgggcatcctatgatcagacaggaaaggaggtggctgatagatggtacatgaagttcattttatgtgatcttcatgcgtcgtaatctacttttggtagataattaagattattaaaccctcatttaaatgtgacataaaatacagctttaagcacataaatacaaagcagcttccatcaggaacatggagcaggcagggactccattttacagaattactgagatttctcagttgtaaaacatgatgtcatcctgcatgcctcctggaattctccaatggggtcgccaaacaacaaatggagaaaaaaagttttacttccttgcattcttctacctttaaatagcaaagtaccactaccaccaccacctcttgcccccttccctcttttcttaaacttctggcatttcagagctcagcaggctacccctggtttctggagagttgggctaggcctgaagctccccctcccccacctctgctaggcagcccaggcctggtctgggagacagcccctcaccctgcctgggctcttggccaagcggccttggatggatgaagtcagagaggtggggtgagggtgagcttactcagggcccccagaggaagccctcagcctctgccctccccccacacagggcgggagcccaggcctgttcctggcagctgtggctgcagctgtgctcctgctccctcctggaatgtgcgacaagcccaaatgttccggggaggcggccggggcagggggcttagaagtgctaatatggttctgtgttttgcctgaaacgataccaggttcccctgaatagcaactttacaaggtccatgtgggagggaccaacccagatgccctgctgagtgtccctgaaaccatggcagctccatctgtcaagatggcaggggccggagtgagggggctgctggcttaacagcaggcatctgggcaggccagtcctcaaagcagctcctgaaggtctgtgttgcactgtcaccagtctcaagctatgcctctaatttcaccagggatattgactaagaagacaataaaatctttttctttgtgta

SEQ ID NO: 7742 - DNA, 785 bp, Homo sapiens
cgcgggctgtgaaccatgaacacccgcaatagagtggtgaactccgggctcggcgcctcccctgcctcccgcccgacccgggatccccaggacccttctgggcggcaaggggagctgagccccgtggaagaccagagagagggtttggaggcagcccctaagggcccttcgcgggagagcgtcgtgcacgcgggccagaggcggtaggagcaagcctacgtcccagcaagactcgcagataaactagcctcttacaaccagaggagtggagctgagagagtgaggagcacaagtgcatacaccttgatagcaccaaatataaaccggagaaatgagatacaaagaattgcggagcaggagctggccaacctggagaagtggaaggagcagaacagagctaaaccggttcacctggtgcccagacggctaggtggaagccagtcagaaactgaagtcagacagaaacaacaactccagctgatgcaatctaaatacaagcaaaagctaaaaagagaagaatctgtaagaatcaagaaggaagctgaagaagctgaactccaaaaaatgaaggcaattcagagagagaagagcaataaactggaggagaaaaaaagacttcaagaaaaccttagaagagaagcatttagagagcatcagcaatacaaaaccgctgagttcttgagcaaactgaacacagaatcgccagacagaagtgcctgtcaaagtgctgtttgtggcccacaatcctcaacatggaaacttcctatcctgcctagggatcacag

SEQ ID NO: 7743 - DNA, 2243 bp, Homo sapiens
gtcaaaatgttttccccatattatgcatggcagcacttgctactttcttttaagttgataacaatcagctcaggggtttgctctgcttgcaaggtcactgcaagaatgaacattgaactttggactatacctgaggggtgaggtaaacaacaggactataaatatcagagtgtgctgctgtggctttgtggagctgccagagtaaagcaaagagaaaggaagcaggcccgttggaagtggttgtgacaaccccagcaatgtggagaagcctggggcttgccctggctctctgtctcctcccatcgggaggaacagagagccaggaccaaagctccttatgtaagcaacccccagcctggagcataagagatcaagatccaatgctaaactccaatggttcagtgactgtggttgctcttcttcaagccagctgatacctgtgcatactgcaggcatctaaattagaagacctgcgagtaaaactgaagaaagaaggatattctaatatttcttatattgttgttaatcatcaaggaatctcttctcgattaaaatacacacatcttaagaataaggtttcagagcatattcctgtttatcaacaagaagaaaaccaaacagatgtctggactcttttaaatggaagcaaagatgacttcctcatatatgatagatgtggccgtcttgtatatcatcttggtttgcctttttccttcctaactttcccatatgtagaagaagccattaagattgcttactgtgaaaagaaatgtggaaactgctctctcacgactctcaaagatgaagacttttgtaaacgtgtatctttggctactgtggataaaacagttgaaactccatcgcctcattaccatcatgagcatcatcacaatcatggacatcagcaccttggcagcagtgagctttcagagaatcagcaaccaggagcaccaaatgctcctactcatcctgctcctccaggccttcatcaccaccataagcacaagggtcagcataggcagggtcacccagagaaccgagatatgccagcaagtgaagatttacaagatttacaaaagaagctctgtcgaaagagatgtataaatcaattactctgtaaattgcccacagattcagagttggctcctaggagctgatgctgccattgtcgacatctgatatttgaaaaaacagggtctgcaatcacctgacagtgtaaagaaaacctcccatctttatgtagctgacagggacttcgggcagaggagaacataactgaatcttgtcagtgacgtttgcctccagctgcctgacaaataagtcagcagcttatacccacagaagccagtgccagttgacgctgaaagaatcaggcaaaaaagtgagaatgaccttcaaactaaatatttaaaataggacatactccccaatttagtctagacacaatttcatttccagcatttttataaactaccaaattagtgaaccaaaaatagaaattagatttgtgcaaacatggagaaatctactgaattggcttccagattttaaattttatgtcatagaaatattgactcaaaccatattttttatgatggagcaactgaaaggtgattgcagcttttggttaatatgtctttttttttctttttccagtgttctatttgctttaatgagaatagaaacgtaaactatgacctaggggtttctgttggataattagcagtttagaatggaggaagaacaacaaagacatgctttccatttttttctttacttatctctcaaaacaatattactttgtcttttcaatcttctacttttaactaataaaataagtggattttgtattttaagatccagaaatacttaacacgtgaatattttgctaaaaaagcatatataactattttaaatatccatttatcttttgtatatctaagactcatcctgatttttactatcacacatgaataaagcctttgtatctttctttctctaatgttgtatcatactcttctaaaacttgagtggctgtcttaaaagatataaggggaaagataatattgtctgtctctatattgcttagtaagtatttccatagtcaatgatggtttaataggtaaaccaaaccctataaacctgacctcctttatggttaatactattaagcaagaatgcagtacagaattggatacagtacggatttgtccaaataaattcaataaaaaccttaaagctga

SEQ ID NO: 7744 - DNA, 950 bp, Homo sapiens
gaaacttctcacctatgagtttgtaaagcagaaatacctggactacagacgagtgcccaacagcaaccccccggagtatgagttcctctggggcctccgttcctaccatgagactagcaagatgaaagtgctgagattcattgcagaggttcagaaaagagaccctcgtgactggactgcacagttcatggaggctgcagatgaggccttggatgctctggatgctgctgcagctgaggccgaagcccgggctgaagcaagaacccgcatgggaattggagatgaggctgtgtctgggccctggagctgggatgacattgagtttgagctgctgacctgggatgaggaaggagattttggagatccctggtccagaattccatttaccttctgggccagataccaccagaatgcccgctccagattccctcagacctttgccggtcccattattggtcctggtggtacagccagtgccaacttcgctgccaactttggtgccattggtttcttctgggttgagtgagatgttgggtaggtacatcactttggattgggcagttagggtctctgggggatatagggtccatggggttgtatttatgtgcatgagctagaagtattaggaaactcattgtagggagatgaggaaagtatggggcagcactctttggtatgtatattccttattatttgatatatatcattgatttttttacttcttctttcttatgttcacagatattgctatcaatcgcagtagtctttcccctgtgtgaggctgaagcctcagattccttctaaacacagctatctagagagccacatcctgttgactgaaagtggcatgcaagataaatttatttgctgttccttgtctactgctttttttccccttgtgtgctgtcaagttttggtatcagaaataaacattgaaattgcaaagtgaa

SEQ ID NO: 7745 - DNA, 1456 bp, Homo sapiens
ctcgagacggcggcgcgtgcagcagctccagaaagcagcgagttggcagagcagggctgcatttccagcaggagctgcgagcacagtgctggctcacaacaagatgctcaaggtgtcagccgtactgtgtgtgtgtgcagccgcttggtgcagtcagtctctcgcagctgccgcggcggtggctgcagccggggggcggtcggacggcggtaattttctggatgataaacaatggctcaccacaatctctcagtatgacaaggaagtcggacagtggaacaaattccgagacgatgattatttccgcacttggagtccaggaaaacccttcgatcaggctttagatccagctaaggatccatgcttaaagatgaaatgtagtcgccataaagtatgcattgctcaagattctcagactgcagtctgcattagtcaccggaggcttacacacaggatgaaagaagcaggagtagaccataggcagtggaggggtcccatattatccacctgcaagcagtgcccagtggtctatcccagccctgtttgtggttcagatggtcatacctactcttttcagtgcaaactagaatatcaggcatgtgtcttaggaaaacagatctcagtcaaatgtgaaggacattgcccatgtccttcagataagcccaccagtacaagcagaaatgttaagagagcatgcagtgacctggagttcagggaagtggcaaacagattgcgggactggttcaaggcccttcatgaaagtggaagtcaaaacaagaagacaaaaacattgctgaggcctgagagaagcagattcgataccagcatcttgccaatttgcaaggactcacttggctggatgtttaacagacttgatacaaactatgacctgctattggaccagtcagagctcagaagcatttaccttgataagaatgaacagtgtaccaaggcattcttcaattcttgtgacacatacaaggacagtttaatatctaataatgagtggtgctactgcttccagagacagcaaggtaaaagatgagacccttacagacgcaaatagttgacctgcatgtcaaattttacttattttttaagaaaataaaacagtacactatgctcattcattttgtgtatgtttttgtaattcaagtgttgaataaaagagcaaataagaagcatgttgaacaaataactctgccagagatacaacacatgctaaataagatgaaaaatagtaattaatattttgtattaatgccactacattatagtttccattatgagccaccaagaagcacacagaaatattaagaacttagatactgaaagtaatcattaaaattaatttgctatctgctttgcccacaatgtaaaataaatggattttttatcactatacggtggagttttaatgttctattttgtgatcttattaaatgagttgaatgaa

SEQ ID NO: 7746 - DNA, 670 bp, Homo sapiens
actagctcattgcgcctctcctgcagtctgattggcaccggctcccattccggctccagcctccaatccgacccccatttcggctgcagcctcggacctagctccggccctcggtctatccggttgcatcctccctccctgttccggatcttatcttgcgccagcgcctactccaggatcccgtagccagacctcaagccatggctggtcccttctcccgtctgctgtccgcccgcccgggactcaggctcctggctttggccggagcggggtctctagccgctgggtttctgctccgaccggaacctgtacgagctgccagtgaacgacggaggctgtatcccccgagcgctgagtacccagacctccgaaagcacaacaactgcatggccagtcacctgaccccagcagtctatgcacggctctgcgacaagaccacacccactggttggacgctagatcagtgtatccagactggcgtggacaaccctggccaccccttcatcaagactgtgggcatggtggctggagatgaggagacctatgaggtatttgctgacctgtttgaccctgtgatccaagagcgacacaatggatatgacccccggacaatgaagcacaccacggatctagatgccagtaaaagtcagaactggccgaagcatccgag

SEQ ID NO: 7747 - DNA, 842 bp, Homo sapiens
tttcccgggagagacgaaagcaggaacgagagcggagcggagcacagtccgccgagcacaagctccagcatcccgtcaggggttgcaggcttgaaactgttacaatatggctttccttggactcttctctttgctggttctgcaaagtatggctacaggggccactttccctgaggaagccattgctgacttgtcagtgaatatgtataatcgtcttagagccactggtgaagatgaaaatattctcttctctccattgagtattgctcttgcaatgggaatgatggaacttggggcccaaggatctacccagaaagaaatccgccactcaatgggatatgacagcctaaaaaatggtgaagaattttctttcttgaaggagttttcaaacatggtaactgctaaagagagccaatatgtgatgaaaattgccaattccttgtttgtgcaaaatggatttcatgtcaatgaggagtttttgcaaatgatgaaaaaatattttaatgcagcagtaaatcatgtggacttcagtcaaaatgtagccgtggccaactacatcaataagtgggtggagaataacacaaacaatctggtgaaagatttggtatccccaagggattttgatgctgccacttatctggccctcattaatgctgtctatttcaaggggaactggaagtcgcagtttaggcctgaaaatactagaaccttttctttcactaaagatgatgaaagtgaagtccaaattccaatgatgtatcagcaaggagaattttattatggggaatttagtgatggctccaatgaagctggtggtatctaccaagtcctagaaataccat

SEQ ID NO: 7748 - DNA, 1038 bp, Homo sapiens
cagatgggtgcaacaaccacagataccaaggggagtggcagcaggaaagagggagagggatccttgggtaggagactctcagaagcgcacaatcctcctctttgccaggaggacaggaatttggacgggctttggaactggacctggctctaaatctcagctctgacacgctcagctgtgtggtttggaacgagctgttgaacctctggcagactggattactgctgctgggaatgaaagagaatcaagaattaaagacaatccaggccaatctgtcgaggcagagggtagaacaccagtgtctttcatctgaggaactgaagcaacgtttcccaaatattcggttgcccaggggagaagtggggctcttggacaattccggaggagttatctatgcatataaggccctcagagccctgcaggatgcaattcgacagctaggaggcatagtgcgtgacggagagaaggtggtggagataaacccagggctactggtcacggtgaaaaccacctccaggagctaccaagctaagagcttggtcatcacagcaggtccttggaccaaccagctcctccgtcccctgggcattgagatgcctctccagaccctgcggatcaacgtgtgttactggcgagagatggttcctgggagctatggtgtgtcccaggcctttccgtgcttcctgtggctgggcttgtgtccccaccacatctacggactgcccacaggagagtacccagggctgatgaaggtcagctatcaccacggcaaccacgcagaccctgaggagcgggactgccccacagcacgcacagacatcggagacgtccagatcctgagcagctttgtcagagatcacttacctgatctgaagcccgagcctgctgtcattgagagctgcatgtacacgaatacccctgatgagcagttcattctcgatcgccacccaaagtatgacaacattgtcattggtgctggattctctgggcacgggttcaagctggcccctgtggtggggaagatcctgtatgaattaa

SEQ ID NO: 7749 - DNA, 536 bp, Homo sapiens
ccttcaaattctcattttattgcctggactggtcgaggcatggaatttaaactgattgagcctgaagaggtggcccgacgttggggcattcagaaaaacaggccagctatgaactatgataaacttagccgttcactccgctattactatgagaaaggaattatgcaaaaggtgagcagctaatacagcattaaaattcattgaaatgttgcacattaatctgaacatcatactttaaacgccacatatcattgcattgctgaagcgagtttttcactcattttaacaaatgcttagctcttggttttggtattacaagcctttctatgtataaatgcctagacattgtagacaaatgtgtagtgatattgtatacagaataataggctttctggaaggtcctactttgctgcacatggttaaaaaagattgttttagtattaatagcacatctgtcttcagaagtttttattgcacattgtctacaattatataattttggaatgcttttgtttatagcaataaagaatctttag

SEQ ID NO: 7750 - DNA, 679 bp, Homo sapiens
gtgaaggttgccactgctgactatatcaagctattgagacagctgtctctggggcaggcctatctgataggaacaggaataaattgaccttgaaatacattgaacttattctgtttatgaaatctgtagtcatttttgacagctcagcaattaggattttttttccttgactgatttggtaggatgtggctttctgattttacagatccgctgttgtaccaggggtctaatcaggcctgtgtctgcctccttcttgaatagcccagtgaattcatctaaacagccttcctacagcaacttcccactccaggtggccagacgggagttccagaccagtgttgtctcccgggacattgacacagcagccaagtttattggtgctggggcagccacagttggtgtggctggttcaggggctggcattggaaccgtgtttggcagcttgatcattggctatgccaggaacccgtctctcaagcagcagctcttctcctatgccattcttggctttgccctgtctgaggccatggggcttttctgtttgatggtcgccttcctcatcctcttcgccatgtgaggctccatgggggggtcaccggcctgttgctactgcaactccacaccattcttggtgctggggtgtgttaagctttaccattaaacacaacgtttctctaaa

SEQ ID NO: 7751 - DNA, 533 bp, Homo sapiens
cccccgctccccgccccccaagccttagtgagattgacagtcgcgtggaggaggcttttccaggcacagcctttctcatggtaatcagcccccggcatcacctcccggccgcggctgcgcccgctcggagcgcggctcgcggaccccggggaccggaaacagggcggcgggcggggagcaggcgagcgagccagaaaagaaaaagaaaaaaatgtcattagaagaggcgtaacacgtcagtccgtccccaggtttgtgtttcctggagtggccgaaagagatcagttctaacctgctctgcaggaataacggtcctgcctcccgacactcttggcgaggtttttgtacagtttgctccgggagctgtttcttcgcttccacctttttctcccccacacttcgcggcttcttcatgctttttcttctcaccatttctggccaaaactacaaacaagacttcgcagatcgagcctgcgtgctgccgaagcagggcgccgagtccatgcgaactgccatctgatccgctcttatca

SEQ ID NO: 7752 - DNA, 649 bp, Homo sapiens
attgccaaaatgctttggagtttttaactgaatctaagaaaagtccaaaatagatttgagactgtaaaaacagaaactgcagcaagggggattcagtgccaatgcatcaacaaaaaagacaaccagagttagtggaaggaaatcttcctgttttcgtgttccccacggagctcatattttatgcagatgatcagtcaacacataagcaagtgttgacactgtacaatccctatgagtttgccttaaagttcaaagtgtgattcgtcatcgagatgttcgatcctgtcactatggtgtaatagacaaattccgtctccaagtttccgagcaaagccaaaggaaggctttgggaagaaaagaggttgttgctactcttctcccatcagcaaaagaacaacaaaaggaagaagaggaaaaaagattaaaggaacatttaactgaaagtttattttttgagcagtcgtttcaaccaggtcttatcacaatggccatacttagaacatgagcaaggatttcaattgacttctgaagtaaatctgtcttgaaaatatgaatgtggactgccttttatctctatttcactccattaacatgcaacaaactattgaatgatttcaaataattgcaaatgtataatatatattttaaa

SEQ ID NO: 7753 - DNA, 499 bp, Homo sapiens
aggaacgcgtcgccgcgtgtccgtgaccagggcaccgcgccacggatgccagatcccaggctggagagagcgggttgccccagatccgcgggcagaggcgcagagccgaagcccggaggagaggagtttgagagccgccatcttcgggcggtgaggcaggaggaggctgcgggttggagcgcgcgtttgagcgtcggtgcgcgactgcgaaggaaacccgggcgggctggaggctcgacagcgcgtcgatgacgtcctcccggcctttcgagccgcacgccaccggcgcgctgctggctgctgcttttaaaagaagtgaggctgggcggggccccggcggggagaagaggctctgtgcagccggggcggatcgcggggaagttcctctcagcgcctcaggtgtctgggcgtgtgcagctgtgttggcgcacacttgccgctacagcccttctgtcagccctttagcttcgatggggcgctggtggccgcctccccctag

SEQ ID NO: 7754 - DNA, 453 bp, Homo sapiens
ctcttcgctcatcgccctgcgcgccctgccccgcagatgccggcgatcgcggtgttggcggcggccgccgcggcgtggtgcttcctccaagtcgagagccggcacctggacgcgctcgccggaggcgcgggccccaaccacggcaatttcctagacaatgaccagtggctgagcaccgtctcccagtacgaccgggacaagtactggaaccgctttcgagacgatgattatttcagaaactggaatcccaacaagccctttgaccaagccctggacccatccaaggacccctgcctgaaggtaaaatgcagccctcacaaagtgtgtgtgacccaggactaccagaccgccctgtgtgtcagccgcaagcacctgctccccaggcaaaagaaggggaacgtggcccagaaacactgggttggaccttcgaatttggtcaagtgcaagccctgt

SEQ ID NO: 7755 - DNA, 773 bp, Homo sapiens
cgcacgctgcagccgagaccccttctgtcacctcaaaatggaagatcgcattgcgagagctgtgacagggcttgctggggaagtgttgggagacgaaggagggagcgaggagaaagagaaataaaagggatgagggagcgtatctggtgcaggccgtgagagcagcgggcaagtgcgatgcggtcttcaagggcttttcggactgtttgctcaagctgggcgacagcatggccaactacccgcagggcctggacgacaagacgaacatcaagaccgtgtgcacatactgggaggatttccacagctgcacggtcacagcccttacggattgccaggaaggggcgaaagatatgtgggataaactgagaaaagaatccaaaaacctcaacatccaaggcagcttattcgaactctgcggcagcggcaacggggcggcggggtccctgctcccggcgttcccggtgctcctggtgtctctctcggcagctttagcgacctggctttccttctgagcgtggggccagctccccccgcgcgcccacccacactcactccatgctcccggaaatcgagaggaagatccattagttctttggggacgttgtgattctctgtgatgctgaaaacactcatataggattgtgggaaatcctgattctcttttttatttcgtttgatttcttgtgttttatttgccaaatgttaccaatcagtgagcaagcaagcacagccaaaatcggacctcagctttagtccgtcttcacacacaaata

SEQ ID NO: 7756 - DNA, 1280 bp, Homo sapiens
agagtccagccgggggtgccgcacccactggggagtggggagggaggacacataggaaatgcctggggctggagtctctttggctctctgccagcaagaaacttaaacgtcctggcttgctcaacccgagtgtccctaaactgtccagacttttgcccgtccattgccactatctctccccactctgggtgtcctacccaaggcgctgtctatgcgtgcccagggcctgtcctgcggatacccagctcgccccttgcagccctttttagagcatctcgcgggctctggcatcaccaagcgcacagccccgggctgcgctcccctaaggtgggtccctcagatccggggctgtccattaaccaggctggcccaaagaggcgcagacactcgaacccgggaaaacttattttattctcggttcccggggttgcagctgccagcggctgagacagtgcgtccgctttgtctctctgcactccccgcagcccccctctcccgcttcctctcccgattaactcccccgacacgctcttctctagctcctctcctcctcccactccttctcctcctcttcctcctcctacaccacaggccgcgctaatgcgcttcctccctcccccggtgtcggtctctttgcatacgcgccccctcccctccccgccgcgccacttatagcggggcgcacggcggcggggcgcagactgctctggcagccggagaggaggcggtgcggcggtggcgctgcggagacccggtccagacgcctggcggccgccggcacacaaggcgctttctagctccctcccccgagcgcacagcccgcctccttccgcggcgcctgcagtggcaggcttgctctgccctaccgtgacgcgctccggagacgctctgcgggtcctggacaccgggtccgcggcgtggggacgacagacggaggcgaacgccatcggtagccggtccgcgagccatcgttcggggcgcagtcctctccccggctggccctcctttctccggggcattcgccaccgcttccctgggctgagacgaccggttcgtcgcctccttgcccgtgaccgtcgctagaactcagttgtgcgttgcggccagtcgccactgctgtgtcagcatttgcaggtatacaggaacagtcctagtgatgcactatttaatcaaaagacggatggatcttttgttcttgcagctggttttccaagaattgatataaagcgggaagaacagaaaacagcagtcataagagtggaaacaaaatgtcagtcagt

SEQ ID NO: 7757 - DNA, 547 bp, Homo sapiens
acactcactcacacacaatgtgccatcctgacaaggcttttacttctgataagctccaatgtgtgtttaatgaatacaaagccgcggtctgggtgccgcctcggccgcggccgctctcccgcgctcctttgccagaagctggcggagagaatttacatttaaagattagcagagtgagaaagagaaatctgccttttgttgtgtggggtgaggaggaggcatctacccctggccttgacgctatctcccatcacctctgctatccagacaggactcaccgagtatcaaatgataagaactgagcacactggatgaaataatacttgcactgggagcactaagaaaagattgatctctgggctggtgaacataatctctgtcccagtcagaaaaggagagaggaaattagcagagcgattggtggagaatgatatctgtcaaaagaaacacttggagagcactgagtttagtaataggtgactgccggaaaaaagggaactttgaatattgtcaagataaaccccacttgaaaaactgaggtgcttaa

SEQ ID NO: 7758 - DNA, 760 bp, Homo sapiens
ggagcgactcggccgtggcggtggccgttaccgttgcctctgggaggctctggcggcggcggcggcccgcggggttcgcggagcgcagcgggccgcccttcgcccgtggccgcctcaagcagcctcgcgccgacacaggggaggcgagacggcggctgcggaggcggcggcgcattgtgcccggccccctccttggcggctcctgcccccgggcggctgtgggatctgggcagccccggggcggcggccgaggctacagagccggcggcaggggatggcaagatagcggcgcgggagcgtaccgtgatcggagcagctatttcctcttcaagaattgaattgagacttctttgctttgtaataggactgactgcattgcacagatgatggatatttacgtatgtttgaaacgaccatcctggatggtggacaataaaagaatgaggactgcttcaaatttccagtggctgttatcaacatttattcttctatatctaatgaatcaagtaaatagccagaaaaagggggctcctcatgatttgaagtgtgtaactaacaatttgcaagtgtggaactgttcttggaaagcaccctctggaacaggccgtggtactgattatgaagtttgcattgaaaacaggtcccgttcttgttatcagttggagaaaaccagtattaaaattccagctctttcacatggtgattatgaaataacaataaattctctacatgattttggaagttctacaagtaaattcac

SEQ ID NO: 7759 - DNA, 786 bp, Homo sapiens
gtttgccacaatcctgggccaccgattattccttgttgattctcctgctgttttcagtttggaaattttctataattgaaaaagatgtgggttttatataaaggcagaacaaatagtgccaaaacttgatatcacaatttttatgtagttgatttcatgtgctttgggcagcattaatgttttttttgacaattacatcctctcattgtttgccctcccccatgtctctctatcctgtgattctctctctaatctccttttcaccagcaggggaagtcttcattctcttgattgtgtcctctgtgccacaagtgaagatgtttgttttgtttctctacagggaggaggatgtgcgagtggctaatttgaaaccaagaatctcctttaatttctttgtcactgcacctaaaaatgtgtctgatatcattcctagaactgaagttgaaaaggccatcaggatgtcccggagccgtatcaatgatgctttccgtctgaatgacaacagcctagagtttctggggatacagccaacacttggacctcctaaccagccccctgtttccatatggctgattgtttttggagttgtgatgggagtgatagtggttggcattgtcatcctgatcttcactgggatcagagatcggaagaagaaaaataaagcaagaagtggagaaaatccttatgcctccatcgatattagcaaaggagaaaataatccaggattccaaaacactgatgatgttcagacctccttttagaaaaatctatgtttttcctcttgag

SEQ ID NO: 7760 - DNA, 799 bp, Homo sapiens
tttcaccaggcccccggcttggggcgccttccttccccatggcgggacacctggcttcagattttgccttctcgccccctccaggtggtggaggtgatgggccaggggggccggagccgggctgggttgatcctcggacctggctaagcttccaaggccctcctggagggccaggaatcgggccgggggttgggccaggctctgaggtgtgggggattcccccatgccccccgccgtatgagttctgtggggggatggcgtactgtgggccccaggttggagtggggctagtgccccaaggcggcttggagacctctcagcctgagggcgaagcaggagtcggggtggagagcaactccgatggggcctccccggagccctgcaccgtcacccctggtgccgtgaagctggagaaggagaagctggagcaaaacccggaggagtcccaggacatcaaagctctgcagaaagaactcgagcaatttgccaagctcctgaagcagaagaggatcaccctgggatatacacaggccgatgtggggctcaccctgggggttctatttggtgggttcccctctgcagattctgaccgcatctcccctctaaggagtatccctgaacctagtggggaggggcaggggcagactctaccctcacccatgaagaggagtagggagagggagaagatgcttgggctttgagctccctctgggaagaggtggtaagcttggatctcagggtcacaagggccctgcgtgctccctcattttgcttctcttttgactggcctcccccaggg

SEQ ID NO: 7761 - DNA, 1639 bp, Homo sapiens
aagcaggcagctgccagaaatttgttggatttgaggagtccagagcgccgacccgctctgtctgcgtggacttatttccttggatcttcgtggactctgaagttgccaagtgtgtgtgcctgctccagaaaacaaaggaagccaccattttttctcattcacagtgcagggagatacctcagtagaagcatacagtccagtcttcaactagggacccctaccaggatgtccaaaaggctcagccctcagttacagcacaacatcacagaagatgcctattgtgaaacacacctggaaccaacacggctgttctgtgatgttgaccaaatcacactctgcagcaaatgcttccagtcccaggagcacaaacatcacatggtgtgtgggatacaagaggctgctgagaattacaggaagttattccaggaaatattgaacacatcgagggagaaacttgaagcagctaaaagcatattgactgatgagcaagaaagaatggcgatgattcaggaagaggaacaaaattttaaaaagatgattgagtctgagtatagtatgagactccggttgttgaatgaagagtgtgagcagaatctccagagacagcaggaatgcatatctgacttgaacctgagagaaacccttctgaatcaagcgatcaagcttgccaccgagctagaggagatgttccaggaaatgctacagagactgggccgtgtggggagagagaacatggagaaactgaaggagagtgaagccagggcttctgaacaggtccgcagcctcctaaagctcatcgtggagcttgagaaaaagtgtggggaaggcaccttggcattgctcaagaatgcaaaatactctttagaaaggagcaagtcactgctgcttgagcatctggagcccgctcatatcacagacctgagtttatgccacataagaggactcagcagcatgttcagagtactccagagacatttaacattggatcctgaaacagctcatccctgcctggcactatctgaggacctgagaactatgagattgagacatgggcagcaggatggggctggcaacccagaaagattggatttcagtgccatggtgctggctgcggagagcttcacctcagggaggcactactgggaggtggacgtggaaaaggcaaccaggtggcaagtgggcatataccacggctctgcagacgcgaagggcagcacggccagagcttccggagagaaagtcttgctcacggggtcggtgatggggaccgagtggactctctgggtcttcccccctctgaaaaggctcttcctggaaaagaagttggacacagttggcgttttccttgactgcgaacacgggcagatatcattctacaatgtgaccgagatgtccctcatttacaatttctcccattgcgccttccaaggagctctcaggcctgtgttttccctctgtatcccaaatggagacacaagtccagactccctcaccatcttacaacatggtccttcttgtgatgctactgttagcccttaatcttctgtgtgtaaaatccaagaccacgagacaccagaaagttggagaacaagactttgaaagaatttgtgtaaactaacccaataaaaagcgttccagg

SEQ ID NO: 7762 - DNA, 2860 bp, Homo sapiens
agctgaggggccgctgcgggtggagtgcggcggagtcggcctcgcgaccccagcttgatccgccgcctgctgcaccgcgcctccgccgcgttcctgcgcgtcccgagccccgacggccgcgtgagtcccgtccgtgcggggaaggcagggccgggtcggcgccgcctgtggagaggacccggcggccgggcctgcttggagccgggcgcggtggcagcggcggcagcggcggcgacttccgaggcccgggctagacagcgcagggccatggctgaggcggccccggccccgacatctgaatgggactccgagtgccttacatccctgcagccccttcctcttcctacacccccagcagcaaatgaggcacacctgcagacagcagctatctctctgtggacagtggtggccgccgtgcaggctatagagaggaaggtggagatccacagccggcgactcctacacctggaaggtcggacagggacagcagagaagaaactagccagctgtgaaaagacagttaccgagcttgggaaccagctggagggcaagtgggccgtgctgggaaccctgctgcaggagtacgggctgctgcagaggcggctggagaacttggagaacctgctgcgcaacaggaacttctggatcctgcggctccctccaggtattaagggagatatcccaaaggtgcctgtggcatttgatgatgtctccatctacttttccactccagagtgggaaaaattagaagaatggcaaaaggaactttacaagaatatcatgaagggcaactacgagtctctcatctccatggattatgctataaatcaacctgatgtcttatctcagattcaaccagaaggggaacataatacagaggaccaggcagggccagaggaaagtgagattcccacagaccccagtgaagagcctggtatttcaacatcagatattctgtcttggattaaacaagaagaagagcctcaggttggggccccaccggagtccaaggagagtgacgtgtacaaaagcacttatgctgatgaagagcttgtcatcaaagctgaaggccttgctagatcctcgttgtgccctgaggttccagtccctttctcttctccaccagcagcagcaaaggatgctttttcagatgtggctttcaaaagccagcagtctacatccatgacaccttttggacgtccagccactgacctgcctgaagcctctgagggacaagtgacttttactcagttgggtagctatcccctcccacctccagttggcgagcaggtgttctcatgccaccactgtggcaagaatctcagccaagacatgttgctgacccaccaatgtagccatgctactgagcaccccttaccctgtgcccagtgccctaagcactttactccacaggcggacctcagcagcacctcccaggaccatgccagcgagacaccccccacctgcccacactgtgccaggacttttactcacccatcaagacttacctaccatcttcgggtccataacagcactgagcgtcctttcccctgtcctgattgccccaagcgctttgctgaccaggctcgactcaccagccaccggagagctcatgcaagcgaaaggcccttccgctgtgcccagtgcggcaggagcttcagcttgaaaatcagcctcctgctccaccagcggggtcatgcacaagagcgccctttctcctgccctcagtgtggcattgacttcaacggccactcggccctgatccgccaccagatgatccacacaggcgagcgtccttacccctgcactgactgcagtaagagcttcatgcgcaaggagcacctgctgaaccaccggcggctgcacacaggcgagcggcccttcagttgtcctcactgtggcaagagcttcatccgcaagcaccacctaatgaaacaccagcgcatccacaccggggagcggccctacccctgctcctactgtggcaggagcttccgctacaaacagacactcaaggaccacctccgttcaggccacaatggaggctgtgggggtgatagtgacccatcaggtcagccacccaacccaccaggtcccctcataactgggcttgaaacttctggcctgggtgtcaacactgaaggtctagagaccaaccagtggtatggggaagggagtggagggggagttttgtaaatccaaatctctgtggcttcatgcttgtatatgctcacagcagggcacaaaatccaagagaaggtctgtgagccccatccaacacccacagtaattattatctggcacatcaatgaatttggggtcctatacacttgactagagacatgcttgtgttttggaatttcacacccttacaagaataccacattttgaaacccagaaagacctggaaaggagcccagcatgtccatcttttcaaagatacaacaaaagcagaagttacaagaatattgcggagaggttggaaagcaggatttaacctctagttctcttgttctcagagaacagcaggttgatagtagattatgtctctaggtagagacagatacatgagaagagcctccaaaactggaagcccatcataaggcatgagaatgtttaactataaagccttttattagttctttgatagctaagatggttgttggagaaagtgcttaagccactgtttatgttgctgcctcctctctcaaaaccagccaagatctgttcacacacctctgtggctgtctttccctgaaacatggtaactcaagactgcctgcctaggtttcttagattaattattcacataaattttgtttaatattggttgaacaagaaatctgactttaaaagatta

SEQ ID NO: 7763 - DNA, 2654 bp, Homo sapiens
acagaatgtagccacctttcttaacggtccgggaaaccagaggtctctccagctactcagggatgaagaaccccatgctggaggtggtgtctttactactggagaagctgctcctcatctccaacttcacgctctttagttcgggcgccgcgggcgaagacaaagggaggaacagtttttatgaaaccagctctttccaccgaggcgacgtgctggaggtgccccggacccacctgacccactatggcatctacctaggagacaaccgtgttgcccacatgatgcccgacatcctgttggccctgacagacgacatggggcgcacgcagaaggtggtctccaacaagcgtctcatcctgggcgttattgtcaaagtggccagcatccgcgtggacacagtggaggacttcgcctacggagctaacatcctggtcaatcacctggacgagtccctccagaaaaaggcactgctcaacgaggaggtggcgcggagggctgaaaagctgctgggctttaccccctacagcctgctgtggaacaactgcgagcacttcgtgacctactgcagatatggcaccccgatcagtccccagtccgacaagttttgtgagactgtgaagataattattcgtgatcagagaagtgttcttgcttcagcagtcttgggattggcgtctatagtctgtacgggcttggtatcatacactacccttcctgcaatttttattccattcttcctatggatggctggctaacttcatacccccatgtcagtgtgtgtattctgtatgtaaatatgtttatatttatagagcatcaatcaatataagcattattgagaaaaatgtgacccgtaacactgtgttctggataaaaatgtgattaggaatcacgcaaagtgcttactgtgtaagcccaagaacaaaggctttctgaatcttctcaggcagttcagatttaaagcaccatccaaaccttggaaatacgacagggtgtggtagaattcagcaatatgagaaaaccagcccctaaaatgatagccacaagagattaattgtgtttttttttctcctgtaatccttgtactgttcggctgaatttgaagattggaagacttatattgagaccagtaactttactgtaaatttactttgtttcattgaaaaaacaaattgataaacatattaaactggaagaattttctttattcaaatgaaaacatgtttgatgactggtcaaaaaataagctcataatctatttttttcatgtagtatataagtcaagaatgttttattgtcattatgtgaaaccaatattggcaaatagtactttaatgatgaagtaaatgaccagaaattatagaaatctgtgttttcctgtaaaaatagcactatagtatcacttgaacaatttgatttggctttacttactaggaagcctggaattcattatttttttccttttatgtgccactgtggctactttaaatcactctgagaggtaaatggatataggattgaagttatgtgggtatttggcatgtgtgtgtgaaataaatatgtagatagtcacatatacacagactgagagataaattgttcttgattgctttattatcatcatactagtgtgttcattatagagtatctgtagaggtgaatgtaaaagtaagtccaatctattttcttatgtcattgaatttgtagtgttaacttgcatatatgttattggatgggttgtcttttaaagcatttactaatgtactctgaaatttttaaaagccttcagatttgttttctagtcacttttttccatatcatttctaattatagtttatatccttaaaagaaggatgccacagtagtatgtaaaacccaaacaagtagaacccaagcaaataaaattatttaaaataattttaaagtggcttagtactgccagtcatgtaaattgattctgctgagggtcttataagaattgagatataacaatggtaaaacaagcattcaagcacttttacaaaattaccaaattcttaaaatgaagccacagctagacttgcatttcaggtattaaaattgctttcttaactgtcaagaatcacaaaataacaaatcatattatgagtgaatatggggagggcggggccaatcagtcaatgataatctgaacaaattttaagagcagattttagattaataatgttttatcaccactaatttgcccacaacaaactcagtatttaatttttcaaattaaatattaaattatttaagtattttaaataattaaaacattaaatggcaacaccatagaatataggtgttctctggacctattctaaccacttaaaattatcttaagtatgcatacataaaagcaaccactatgagaactaccgtgttagtggtttttcacttactgtatattacccttgtaggaatagtttaaggaaattcatttcttaaaaatatagtgtcctcaaataattaatttttttgcaaactttagttattacaggcagcaaaaaccactgtctgaaactaaatctgtgttcaaagatgaagacccctcattaaaagccaaggacgttcttaagattggaactgacataattagtcttgacttacttcattaaagcaagattcaattc

SEQ ID NO: 7764 - DNA, 586 bp, Homo sapiens
agaatttatgtttattaggcactaattctgggccaattctcaaaactatcctgtgtggtttcagaaccgaagagccaagttccgcaggaatgagagagccatgctagccaataaaaacgcttccctcctcaaatcctactcaggagacgtgactgctgtggagcagcccatcgtacctcgtcctgctccgagacccaccgattatctctcctgggggacagcgtctccgtacagcgccatggctacttattctgccacatgtgccaacaatagccctgcacagggcatcaacatggccaacagcattgccaacctgagactgaaggccaaggaatatagtttacagaggaaccaggtgccaacagtcaactgaggaaaaaaaataattaaacaggcctaagaagaaatcaaaaaccataagacacctatcctgctctgttatttcttcatctgctggggggaaaaagtaaattacaaacaaacaaacaaagcagaactaaaatattgggaccatggcagagaaaagcaggagaggagcaaaatgaaaattagttaacaaatgttcctcctccctctgggataccac

SEQ ID NO: 7765 - DNA, 848 bp, Homo sapiens
ttaaatgacttggatgttttataggttggcactcatcatgagcccctgttctcattctgcaaatggtgaagctctctattgtcctgaccccacagttcctgtcccatgaccagggccagctcaccaaggagctgcagcagcatgtaaagtcagtgacatgcccatgcgagtacctgaggaaggttgatggacggatggctacatggatgtgatggagatggtttactatcgggaccttccgcaccctgctgatgttttgttgcttaggatatgaatggctgagcggaggctgtaaaacctggcactctgcttgggtatgaggttcttcctgccatcctgccatcatttgttttttatgttttgtcgccataagtgaccttgaggaaccctgggagctcaggaaggaaggagcgcccagaagcagggacagggagctggttggggaggaccagaaatcaggttatcaatactctggctgaccatcatcatcgtgggactgactttggtggaagtccttggttacatgtcattattgcgtttccgacaagttataaagttgtcattaccctctggatagtttacctttgggtgtctctcctgaagactatcttctggtctcgaaatggacatgatggatccacggatgtacagcagagagcctggaggtccaaccgccgtagacaggaagggctgaggtccatttgtatgcacacaaagaaaagagtttcttcctttcgaggaaataaaattggcctgaaagacgtcattactctacggagacatgtggaaacaaaagttagagctaaaatccgtaagaggaaggtgacaacgaaaatcaaccatcatga

SEQ ID NO: 7766 - DNA, 1555 bp, Homo sapiens
cattaaaagaagcacatgtccttgcatttcaaactatggaagaggaaaaggaaaaggagcaaagagctcttgaaaatcatttacaacagaagcattctgcagagcttcaatcactaaaagatgcacacagagagtcaatggagggcttccggatagaaatggaacaggaacttcagactcttcggtttgaattagaagatgaaggaaaggctatgcttgcttccttgcgctcagaactcaaccatcaacatgcagctgcaattgatttgttacggcataatcatcatcaagaattggcagctgctaaaatggaattagagagaagcatagacatcagcagaagacagagtaaggagcacatatgtagaattacagatctacaagaggaattaagacacagagagcatcacatctctgaattggataaggaggttcagcaccttcatgagaatataagtgccctaaccaaagaactggaatttaaggggaaagaaattctcagaatacgaagtgaatctaaccaacagataaggttgcatgaacaagatttaaacaagagacttgaaaaagagttggatgtcatgacagcagaccacctcagagagaaaaatatcatgcgggcagattttaataagactaacgagctactcaaggaaataaatgccgctttacaagtgtcattagaagaaatggaagaaaaatatctaatgagagaatcaaaaccagaagatatacagatgattacagaattaaaagccatgcttacagaaagagaccagatcataaagaaactaattgaggataataagttttatcagctggaattagtcaatcgagaaactaacttcaacaaagtgtttaactcaagtcctactgttggtgttattaatccattggctaagcaaaagaagaagaatgataaatcaccaacaaacaggtttgtgagtgttcccaatctaagtgctctggaatctggtggagtgggcaatggacatcctaaccgcctggatcccattcctaattctccagtccacgatattgagttcaacagcagcaaaccacttccacagccagtgccacctaaagggcccaagacatttttgaggtatcagtaagatgcatgtgcatgagctcaaggaacatgactactggagtttccattacacattgttgcgtgccttgtaattttccccaaagacgtcctgctcagagtgaagcttctccagtggcttctccagatccccagcgccaggagtggtttgcccggtacttcacattctgaaagaattgtgttggcacagctctgtatagactgttactaagagcatgactttatacagattgttatgtaaataggctttcctatgtcaaacactgtgaatgagaaagtatttgtctctccaacttgaaaatgcactgtatttcctgtgatatttattggaatcattctataaggtactatattatgtgtgtaattataactgttatttttatttgagatggaagagtctttaacctttgtaattactgcataataaattttgttagaatcaaa

SEQ ID NO: 7767 - DNA, 1054 bp, Homo sapiens
atggctgttagtgtcacaccaattcgggacacaaaatggctaacactggaagtatgtagagagttccagagggggacttgctcacggccagacacggaatgtaaatttgcacatccttcgaaaagctgccaagttgaaaatggacgagtaatcgcctgctttgattcattgaaaggccgttgctccagggagaactgcaaatatcttcatccacccccacatttaaaaacgcagttggagataaatggacgcaataacttgattcagcagaagaacatggccatgttggcccagcaaatgcaactagccaatgccatgatgcctggtgccccattacaacccgtgccaatgttttcagttgcaccaagcttagccaccaatgcatcagcagccgcctttaatccctatctgggacctgtttctccaagcctggtcccggcagagatcttgccgactgcaccaatgttggttacagggaatccgggtgtccctgtacctgcagctgctgcagctgctgcacagaaattaatgcgaacagacagacttgaggtatgtcgagagtaccaacgtggcaattgcaaccgaggagaaaatgattgtcggtttgctcatcctgctgacagcacaatgattgacaccaatgacaacacagtcactgtgtgtatggattacatcaaagggagatgctctcgggaaaagtgcaaatactttcatccccctgcacatttgcaagccaagatcaaggctgcccaataccaggtcaaccaggctgcagctgcacaggctgcagccaccgcagctgccatgggaattcctcaagctgtacttcccccattaccaaagaggcctgctcttgaaaaaaccaacggtgccaccgcagtctttaacactggtattttccaataccaacaggctctagccaacatgcagttacaacagcatacagcatttctcccaccaggctcaatattgtgcatgacacccgctacaagtgttgatacccataatatctgccgaacatctgactagccacaagtatgttacccagatgtag

SEQ ID NO: 7768 - DNA, 455 bp, Homo sapiens
gacagcagagcaaatcagttgcctggagttcccagtgaagttgtacctgtgcccgtgcgataacgtcagtggaagctgccccgagtttggggctttagccccttggagaaaacagggccacatagctgcctttctatcaagtctccctacaaaactgagaggctctgggaaactcagcctgtgaccccagcgtgggtgaagataggatcaagatggccatgtggcaggggtgccatggataacagaggctttcagcaggggagttttagtagcttccagaacagctccagtgatgaagacctgatggacattccagcaaccgctatggatttctccatgagagatgatgttcctcccttagaccgagaagtaggaggtatcattattggtgatgataatttatcttaattttttaaaatttatgtacaataaaattttatttttttttaatttta

SEQ ID NO: 7769 - DNA, 8774 bp, Homo sapiens
gagcgggcgggctgcgaggccgcggggcatgcgggaggcggaggggtggggaccggggtgggctgcgccctcccgctctggcccattccacaccccgccgaaagcggacactgtcagctgaatcactccccttttaggaggagggaggggaaaaaggtgtctagctcctttctgcttaaaaaagcacagggagatcgcgggcagctttgcagtcgctgccttctcgcgcctgaccatgcacccctgcatcttcctgctgggccacaggcgagcgctttatttctggagctgagggctaaaacttttttgacttttcttctcctcaacatctgaatcatgccatgtgcccagaggagctggcttgcaaacctttccgtggtggctcagctccttaactttggggcgctttgctatgggagacagcctcagccaggcccggttcgcttcccggacaggaggcaagagcattttatcaagggcctgccagaataccacgtggtgggtccagtccgagtagatgccagtgggcattttttgtcatatggcttgcactatcccatcacgagcagcaggaggaagagagatttggatggctcagaggactgggtgtactacagaatttctcacgaggagaaggacctgttttttaacttgacggtcaatcaaggatttctttccaatagctacatcatggagaagagatatgggaacctctcccatgttaagatgatggcttcctctgcccccctctgccatctcagtggcacggttctacagcagggcaccagagttgggacggcagccctcagtgcctgccatggactgactggatttttccaactaccacatggagactttttcattgaacccgtgaagaagcatccactggttgagggagggtaccacccgcacatcgtttacaggaggcagaaagttccagaaaccaaggagccaacctgtggattaaaggacagtgttaacatctcccagaagcaagagctatggcgggagaagtgggagaggcacaacttgccaagcagaagcctctctcggcgttccatcagcaaggagagatgggtggagacactggtggtggccgacacaaagatgattgaataccatgggagtgagaatgtggagtcctacatcctcaccatcatgaacatggtcactgggttgttccataacccaagcattggcaatgcaattcacattgttgtggttcggctcattctactcgaagaagaagagcaaggactgaaaatagttcaccatgcagaaaagacactgtctagcttctgcaagtggcagaagagtatcaatcccaagagtgacctcaatcctgttcatcacgacgtggctgtccttctcaccagaaaggacatctgtgctggtttcaatcgcccctgcgagaccctgggcctgtctcacctttcaggaatgtgtcagcctcaccgcagttgtaacatcaatgaagattcgggactccctctggctttcacaattgcccatgagctaggacacagcttcggcatccagcatgatgggaaagaaaatgactgtgagcctgtgggcagacatccgtacatcatgtcccgccagctccagtacgatcccactccgctgacatggtccaagtgcagcgaggagtacatcacccgcttcttggaccgaggctgggggttctgtcttgatgacatacctaaaaagaaaggcttgaagtccaaggtcattgcccccggagtgatctatgatgttcaccaccagtgccagctacaatatggacccaatgctaccttctgccaggaagtagaaaacgtctgccagacactgtggtgctccgtgaagggcttttgtcgctctaagctggacgctgctgcagatggaactcaatgtggtgagaagaagtggtgtatggcaggcaagtgcatcacagtggggaagaaaccagagagcattcctggaggctggggccgctggtcaccctggtcccactgttccaggacctgtggggctggagtccagagcgcagagaggctctgcaacaaccccgagccaaagtttggagggaaatattgcactggagaaagaaaacgctatcgcttgtgcaacgtccacccctgtcgctcagaggcaccaacatttcggcagatgcagtgcagtgaatttgacactgttccctacaagaatgaactctaccactggtttcccatttttaacccagcacatccttgtgagctctactgccgacccatagatggccagttttctgagaaaatgctggatgctgtcattgatggtaccccttgctttgaaggcggcaacagcagaaatgtctgtattaatggcatatgtaagatggttggctgtgactatgagatcgattccaatgccaccgaggatcgctgcggtgtgtgcctgggagatggctcttcctgccagactgtgagaaagatgtttaagcagaaggaaggatctggttatgttgacattgggctcattccaaaaggagcaagggacataagagtgatggaaattgagggagctggaaacttcctggccatcaggagtgaagatcctgaaaaatattacctgaatggagggtttattatccagtggaacgggaactataagctggcagggactgtctttcagtatgacaggaaaggagacctggaaaagctgatggccacaggtcccaccaatgagtctgtgtggatccagcttctattccaggtgactaaccctggcatcaagtatgagtacacaatccagaaagatggccttgacaatgatgttgagcagcagatgtacttctggcagtacggccactggacagagtgcagtgtgacctgcgggacaggtatccgccgccaaactgcccattgcataaagaagggccgcgggatggtgaaagctacattctgtgacccagaaacacagcccaatgggagacagaagaagtgccatgaaaaggcttgtccacccaggtggtgggcaggggagtgggaagcatgctcggcgacatgcgggccccacggggagaagaagcgaaccgtgctgtgcatccagaccatggtctctgacgagcaggctctcccgcccacagactgccagcacctgctgaagcccaagaccctcctttcctgcaacagagacatcctgtgcccctcggactggacagtgggcaactggagtgagtgttctgtttcctgtggtggtggagtgcggattcgcagtgtcacatgtgccaagaaccatgatgaaccttgcgatgtgacaaggaaacccaacagccgagctctgtgtggcctccagcaatgcccttctagccggagagttctgaaaccaaacaaaggcactatttccaatggaaaaaacccaccaacactaaagcccgtccctccacctacatccaggcccagaatgctgaccacacccacagggcctgagtctatgagcacaagcactccagcaatcagcagccctagtcctaccacagcctccaaagaaggagacctgggtgggaaacagtggcaagatagctcaacccaacctgagctgagctctcgctatctcatttccactggaagcacttcccagcccatcctcacttcccaatccttgagcattcagccaagtgaggaaaatgtttccagttcagatactggtcctacctcggagggaggccttgtagctacaacaacaagtggttctggcttgtcatcttcccgcaaccctatcacttggcctgtgactccattttacaataccttgaccaaaggtccagaaatggagattcacagtggctcaggggaagaaagagaacagcctgaggacaaagatgaaagcaatcctgtaatatggaccaagatcagagtacctggaaatgacgctccagtggaaagtacagaaatgccacttgcacctccactaacaccagatctcagcagggagtcctggtggccacccttcagcacagtaatggaaggactgctccccagccaaaggcccactacttccgaaactgggacacccagagttgaggggatggttactgaaaagccagccaacactctgctccctctgggaggagaccaccagccagaaccctcaggaaagacggcaaaccgtaaccacctgaaacttccaaacaacatgaaccaaacaaaaagttctgaaccagtcctgactgaggaggatgcaacaagtctgattactgagggctttttgctaaatgcctccaattacaagcagctcacaaacggccacggctctgcacactggatcgtcggaaactggagcgagtgctccaccacatgtggcctgggggcctactggagaagggtggagtgcagcacccagatggattctgactgtgcggccatccagagacctgaccctgcaaaaagatgccacctccgtccctgtgctggctggaaagtgggaaactggagcaagtgctccagaaactgcagtgggggcttcaagatacgcgagattcagtgcgtggacagccgggaccaccggaacctgaggccatttcactgccagttcctggccggcattcctcccccattgagcatgagctgtaacccggagccctgtgaggcgtggcaggtggagccttggagccagtgctccaggtcctgtggaggtggagttcaggagagaggagtgttctgtccaggaggcctctgtgattggacaaaaagacccacatccaccatgtcttgcaatgagcacctgtgctgtcactgggccactgggaactgggacctgtgttccacttcctgtggaggtggctttcagaagaggactgtccaatgtgtgccctcagagggcaataaaactgaagaccaagaccaatgtctatgtgatcacaaacccagacctccagaattcaaaaaatgcaaccagcaggcctgcaagaaaagtgccgatttactttgcactaaggacaaactgtcagccagtttctgccagacactgaaagccatgaagaaatgttctgtgcccaccgtgagggctgagtgctgcttctcgtgtccccagacacacatcacacacacccaaaggcaaagaaggcaacggttgctccaaaagtcaaaagaactctaagcccaaaaggaagccagcttccaccagactgcagcagcctgctgaccatgacatgctttagccctgggagctgcttcgttgaggttttgcttcatatatttcagattcagctttgggtcatgatgaaacaaaatccattgtgttcctctagccaccgaatgtccctcacaggaggcctaggctgccgtacttgctgctccctgataggaaggtgaaatagctaggagaatcaggcagcacctggtatcggctcctgggaaaggtgccaggttagacagatttgtgaaatactgtatttttgttctcccttaaagataaaaacaaagagaccagctatttccctgactacctcaagagtatcaggcaacacttacccaggggacaaataatcttcttaatttatcttgatgaatacctttcttttttttttcttgcctccctgcctggggcagctgctatttaaaatgtcacagcggagctttaggaacattcctttaattcatccaggcagaggactgctttcttcaccccatgttcaactagggcaggaagtgctggttacatccctcagtctcttcctccatccctgtagggctccatatctgggctgcttagagtctcctgccaaccttgggacactagactaagaggaaacaggcataagaaacacagcctaaggggtttaggtcacttacacagaaaacacttctggtttgaagagcatttctatgaaaactcgtaaaatgcaaatgagcagaaatcaatttcttaatattacagaaaaggaactgtgggcctttattcttcccactttcctggcaaatacacactcctttgcagaagggaaaatgtgtcttcctggctgacttcctcccatcctccagtccccacaggaggcctgagctcaggtcccaccatcgtcttgctgcaggggctgtatatgcaaagaccactatgaccagctctagggctgccacctgtcctcacctcttctcaggttggaaaatggaggttccatattaaaatatttcaaagaaccaggtaaattgtactaagtacaagaacatagtgcaaacttctaatctagagaaaaaacatttctaaaaagtaaggtaaaggggatctactcctcagtgtacccaatatgtagttagtcttaaagatcttttactttggggagaacaggtgaatcagggagtccaaagaaactgaaatgaaagttagaatgcttgttctggatgttcctacctcccaccagaagtcaaagtaggcttggtctcaaattcagagcaaatttctagacaaagtgatttctaagggaaggtacttacatgaactgaacccagagaaagagggtaagtgggtgggtggaggggcataagcttcaaatgaaagaagatatcagaaccaattcttgacagggagaaaggcaaggatgtggccttcatgtgatgggcagcatattttctgactcatgcacagatacacttaatactcctcatggaacacaatatcccacgtctccctttacctatccgttcagcagaatggtgctattaaaaaaatggtgctaatatctagatggtggcagaattaatgtaaacatagataggcatacaaatgggtaagtgtatgtgaaactctccatatacatcttctgttaaacatgtaacggtgttgctgaccaatgccagttttattgcttgggtaccttgaatttaagatttaatattatgtgctttttatttttttccaagccattaacgtgtattactctcatgaattcctgtgaaaaataaaacagtgggattgggatgaaattcaagatagaccagaaacaggaggaaagtacaaatgtttacctaaagccagagaatttatttctagatgataattacattattgtattctctgcctttaaacataaacattgctggccgatagcaatctctggtgaataatggttttcgaggagaggagacacttaaattgttagtgacatgagtggaggagaatctgatatttactaatgaggcagtttgcaaagactgtccctgaagtgtagtgtagtctttcagggggattcatttagtaagctagattgatttaacctggtactgtactagcatagggtcaaatacgtgtcatcagagacctgggtatgaccaggcttacaaaactcaggaacaaactcagattcctactgacctcaaccaactaaactaggccaaatttctccgtgtacaaaatggaccacgttatttacaatccacgtggtggagaagatggtagacatgtggagagagtttggccaggtgctccattctaggtctttttccagtttctcaaaggcagaacattggctcctaattatttgccatggatatttgcttcctgttctggagctatgttgtaagacagctgtgtgatgtccatcattcttgactccagaatgaagacagggcttgctgttttctgtcctgttggtatcatctgttgccttggcgatcactcagtgatgagtcgtcagtattttgacatgtcccagtgcttgctgtacaagaggggactcagatcaacaggaagactctgaagacaggaacctgcatggtatcttacatctttgatacttgggtgctgatatgaagcagagttgttgatttactttatctaggcccttctttcttctcacctggatcaagcaactgagaagtgtatcaggagacactggatacatatctctatgaaatagagagggccatcgcagggcctggtacttaactacattaacgttctaaaacccagtttggtttacgttgtctttcacagtagtatatttagctcttctctggaaagttgtgggttaatataattcttaaacatgaaaatgtaattaaacacaccacgagagaacaatattccaggagacttaatagtgattactttcttcaatcaggaaatcgtttcagtgcctcctttgtaggaatgctttgttttgtgatgggttttcttaaagaagagcacacctccgtccaatctcctgagacagccacgtctccgctgacatcccactgtgatgctttcagatagtcagtgaatgtttctgataaccttcatccagtatctgaaacacaatgtgagagattatattgttttagataataacatcccatttagttgactaaaatcttccaaactctgaaagctgcacactgctactccagagagtgcaggtcttagctcttctcctttctgacttcaagatgaatctttgggacgatgtttctggtgcttggtccacagtgattcacttttgaaggagaggccacatgacatgaactgcctggtgttacaacctagctaacatatttgatgctactcctgttgtctgtactgcttattcaagtagtattctaagttatgttactaaaaaacatggtgggtaaagcacaatcctacccatcattgtcctccaaaataattgtatgacatacacggcccagcccattgccctccctgcatctctgtgctgctttgccatttccccttctacccagcctcctcaaggggtaccttggtggatatttcagtacttaaaaccagactgtaatcataacctccctctgtgtggcatcaataaatagccaaactca

SEQ ID NO: 7770 - DNA, 8076 bp, Homo sapiens
gtaatatgcacgtgtcactagctgaggccctggaggttcggggtggaccacttcaggaggaagaaatatgggctgtattaaatcaaagtgctgaaagtctccaagaattattcagaaaagtaagcctagctgatcctgctgcccttggcttcatcatttctccatggtctctgctgttgctgccatctggtagtgtgtcatttacagatgaaaatatttccaatcaggatcttcgagcattcactgcaccagaggttcttcaaaatcagtcactaacttctctctcagatgttgaaaagatccacatttattctcttggaatgacactgtattggggggctgattatgaagtgcctcagagccaacctattaagcttggagatcatctcaacagcatactgcttggaatgtgtgaggatgttatttacgctcgagtttctgttcggactgtgctggatgcttgcagtgcccacattaggaatagcaattgtgcaccctcattttcctacgtgaaacacttggtaaaactggttctgggaaatctttctgggacagatcagctttcctgtaacagtgaacaaaagcctgatcgaagccaggctattcgagatcgattgcgaggaaaaggattaccaacaggaagaagctctacttctgatgtactagacatacaaaagcctccactctctcatcagacctttcttaacaaagggcttagtaaatctatgggatttctgtccatcaaagatacacaagatgagaattatttcaaggacattttatcagataattctggacgtgaagattctgaaaatacattctccccttaccagttcaaaactagtggcccagaaaaaaaacccatccctggcattgatgtgctttctaagaagaagatctgggcttcatccatggacttgctttgtacagctgacagagacttctcttcaggagagactgccacatatcgtcgttgtcaccctgaggcagtaacagtgcggacttcaactactcctagaaaaaaggaggcaagatactcagatggaagtatagccttggatatctttggccctcagaaaatggatccaatatatcacactcgagaattgcccacctcctcagcaatatcaagtgctttggaccgaatccgagagagacaaaagaaacttcaggttctgagggaagccatgaatgtagaagaaccagttcgaagatacaaaacttatcatggtgatgtctttagtacctccagtgaaagtccatctattatttcctctgaatcagatttcagacaagtgagaagaagtgaagcctcaaagaggtttgaatccagcagtggtctcccaggggtagatgaaaccttaagtcaaggccagtcacagagaccgagcagacaatatgaaacaccctttgaaggcaacttaattaatcaagagatcatgctaaaacggcaagaggaagaactgatgcagctacaagccaaaatggcccttagacagtctcggttgagcctatatccaggagacacaatcaaagcgtccatgcttgacatcaccagggatccgttaagagaaattgccctagaaacagccatgactcaaagaaaactgaggaatttctttggccctgagtttgtgaaaatgacaattgaaccatttatatctttggatttgccacggtctattcttactaagaaagggaagaatgaggataaccgaaggaaagtaaacataatgcttctgaacgggcaaagactggaactgacctgtgataccaaaactatatgtaaagatgtgtttgatatggttgtggcacatattggcttagtagagcatcatttgtttgctttagctaccctcaaagataatgaatatttctttgttgatcctgacttaaaattaaccaaagtggccccagagggatggaaagaagaaccaaagaaaaagaccaaagccactgttaattttactttgtttttcagaattaaattttttatggatgatgttagtctaatacaacatactctgacgtgtcatcagtattaccttcagcttcgaaaagatattttggaggaaaggatgcactgtgatgatgagacttccttattgctggcatccttggctctccaggctgagtatggagattatcaaccagaggttcatggtgtgtcttactttagaatggagcactatttgcccgccagagtgatggagaaacttgatttatcctatatcaaagaagagttacccaaattgcataatacctatgtgggagcttctgaaaaagagacagagttagaatttttaaaggtctgccaaagactgacagaatatggagttcattttcaccgagtgcaccctgagaagaagtcacaaacaggaatattgcttggagtctgttctaaaggtgtccttgtgtttgaagttcacaatggagtgcgcacattggtccttcgctttccatggagggaaaccaagaaaatatctttttctaaaaagaaaatcacattgcaaaatacatcagatggaataaaacatggcttccagacagacaacagtaagatatgccagtacctgctgcacctctgctcttaccagcataagttccagctacagatgagagcaagacagagcaaccaagatgcccaagatattgagagagcttcgtttaggagcctgaatctccaagcagagtctgttagaggatttaatatgggacgagcaatcagcactggcagtctggccagcagcaccctcaacaaacttgctgttcgacctttatcagttcaagctgagattctgaagaggctatcctgctcagagctgtcgctttaccagccattgcaaaacagttcaaaagagaagaatgacaaagcttcatgggaggaaaagcctagagagatgagtaaatcataccatgatctcagtcaggcctctctctatccacatcggaaaaatgtcattgttaacatggaacccccaccacaaaccgttgcagagttggtgggaaaaccttctcaccagatgtcaagatctgatgcagaatctttggcaggagtgacaaaacttaataattcaaagtctgttgcgagtttaaatagaagtcctgaaaggaggaaacatgaatcagactcctcatccattgaagaccctgggcaagcatatgttctaggaatgactatgcatagttctggaaactcttcatcccaagtacccttaaaagaaaatgatgtgctacacaaaagatggagcatagtatcttcaccagaaagggagatcaccttagtgaacctgaaaaaagatgcaaagtatggcttgggatttcaaattattggtggggagaagatgggaagactggacctaggcatatttatcagttcagttgcccctggaggaccagctgacttggatggatgcttgaagccaggagaccgtttgatatctgtgaatagtgtgagtctggagggagtcagccaccatgctgcaattgaaattttgcaaaatgcacctgaagatgtgacacttgttatctctcagccaaaagaaaagatatccaaagtgccttctactcctgtgcatctcaccaatgagatgaaaaactacatgaagaaatcttcctacatgcaagacagtgctatagattcttcttccaaggatcaccactggtcacgtggtaccctgaggcacatctcggagaactcctttgggccatctgggggcctgcgggaaggaagcctgagttctcaagattccaggactgagagtgccagcttgtctcaaagccaggtcaatggtttctttgccagccatttaggtgaccaaacctggcaggaatcacagcatggcagcccttccccatctgtaatatccaaagccaccgagaaagagactttcactgatagtaaccaaagcaaaactaaaaagccaggcatttctgatgtaactgattactcagaccgtggagattcagacatggatgaagccacttactccagcagtcaggatcatcaaacaccaaaacaggaatcttcctcttcagtgaatacatccaacaagatgaattttaaaactttttcttcatcacctcctaagcctggagatatctttgaggttgaactggctaaaaatgataacagcttggggataagtgtcacggtactgtttgacaagggaggtgtgaatacgagtgtcagacatggtggcatttatgtgaaagctgttattccccagggagcagcagagtctgatggtagaattcacaaaggtgatcgcgtcctagctgtcaatggagttagtctagaaggagccacccataagcaagctgtggaaacactgagaaatacaggacaggtggttcatctgttattagaaaagggacaatctccaacatctaaagaacatgtcccggtaaccccacagtgtaccctttcagatcagaatgcccaaggtcaaggcccagaaaaagtgaagaaaacaactcaggtcaaagactacagctttgtcactgaagaaaatacatttgaggtaaaattatttaaaaatagctcaggtctaggattcagtttttctcgagaagataatcttataccggagcaaattaatgccagcatagtaagggttaaaaagctctttcctggacagccagcagcagaaagtggaaaaattgatgtaggagatgttatcttgaaagtgaatggagcctctttgaaaggactatctcagcaggaagtcatatctgctctcaggggaactgctccagaagtattcttgcttctctgcagacctccacctggtgtgctaccggaaattgatactgcgcttttgaccccacttcagtctccagcacaagtacttccaaacagcagtaaagactcttctcagccatcatgtgtggagcaaagcaccagctcagatgaaaatgaaatgtcagacaaaagcaaaaaacagtgcaagtccccatccagaagagacagttacagtgacagcagtgggagtggagaagatgacttagtgacagctccagcaaacatatcaaattcgacctggagttcagctttgcatcagactctaagcaacatggtatcacaggcacagagtcatcatgaagcacccaagagtcaagaagataccatttgtaccatgttttactatcctcagaaaattcccaataaaccagagtttgaggacagtaatccttcccctctaccaccggatatggctcctgggcagagttatcaaccccaatcagaatctgcttcctctagttcgatggataagtatcatatacatcacatttctgaaccaactagacaagaaaactggacacctttgaaaaatgacttggaaaatcaccttgaagactttgaactggaagtagaactcctcattaccctaattaaatcagaaaaaggaagcctgggttttacagtaaccaaaggcaatcagagaattggttgttatgttcatgatgtcatacaggatccagccaaaagtgatggaaggctaaaacctggggaccggctcataaaggttaatgatacagatgttactaatatgactcatacagatgcagttaatctgctccgggctgcatccaaaacagtcagattagttattggacgagttctagaattacccagaataccaatgttgcctcatttgctaccggacataacactaacgtgcaacaaagaggagttgggtttttccttatgtggaggtcatgacagcctttatcaagtggtatatattagtgatattaatccaaggtccgtcgcagccattgagggtaatctccagctattagatgtcatccattatgtgaacggagtcagcacacaaggaatgaccttggaggaagttaacagagcattagacatgtcacttccttcattggtattgaaagcaacaagaaatgatcttccagtggtccccagctcaaagaggtctgctgtttcagctccaaagtcaaccaaaggcaatggttcctacagtgtggggtcttgcagccagcctgccctcactcctaatgattcattctccacggttgctggggaagaaataaatgaaatatcgtaccccaaaggaaaatgttctacttatcagataaagggatcaccaaacttgactctgcccaaagaatcttatatacaagaagatgacatttatgatgattcccaagaagctgaagttatccagtctctgctggatgttgtggatgaggaagcccagaatcttttaaacgaaaataatgcagcaggatactcctgtggtccaggtacattaaagatgaatgggaagttatcagaagagagaacagaagatacagactgcgatggttcacctttacctgagtattttactgaggccaccaaaatgaatggctgtgaagaatattgtgaagaaaaagtaaaaagtgaaagcttaattcagaagccacaagaaaagaagactgatgatgatgaaataacatggggaaatgatgagttgccaatagagagaacaaaccatgaagattctgataaagatcattcctttctgacaaacgatgagctcgctgtactccctgtcgtcaaagtgcttccctctggtaaatacacgggtgccaacttaaaatcagtcattcgagtcctgcggggtttgctagatcaaggaattccttctaaggagctggagaatcttcaagaattaaaacctttggatcagtgtctaattgggcaaactaaggaaaacagaaggaagaacagatataaaaatatacttccctatgatgctacaagagtgcctcttggagatgaaggtggctatatcaatgccagcttcattaagataccagttgggaaagaagagttcgtttacattgcctgccaaggaccactgcctacaactgttggagacttctggcagatgatttgggagcaaaaatccacagtgatagccatgatgactcaagaagtagaaggagaaaaaatcaaatgccagcgctattggcccaacatcctaggcaaaacaacaatggtcagcaacagacttcgactggctcttgtgagaatgcagcagctgaagggctttgtggtgagggcaatgacccttgaagatattcagaccagagaggtgcgccatatttctcatctgaatttcactgcctggccagaccatgatacaccttctcaaccagatgatctgcttacttttatctcctacatgagacacatccacagatcaggcccaatcattacgcactgcagtgctggcattggacgttcagggaccctgatttgcatagatgtggttctgggattaatcagtcaggatcttgattttgacatctctgatttggtgcgctgcatgagactacaaagacacggaatggttcagacagaggatcaatatattttctgctatcaagtcatcctttatgtcctgacacgtcttcaagcagaagaagagcaaaaacagcagcctcagcttctgaagtgacatgaaaagagcctctggatgcatttccatttctctccttaacctccagcagactcctgctctctatccaaaataaagatcacagagcagcaagttcatacaacatgcatgttctcctctatcttagaggggtattcttcttgaaaataaaaaatattgaaatgctgtatttttacagctactttaacctatgataattatttacaaaattttaacactaaccaaacaatgcagatcttagggatgattaaaggcagcatttgatgatagcagacattgttacaaggacatggtgagtctatttttaatgcaccaatcttgtttatagcaaaaatgttttccaatattttaataaagtagttattttataggggatacttgaaaccagtatttaagctttaaatgacagtaatattggcatagaaaaaagtagcaaatgtttactgtatcaatttctaatgtttactatatagaatttcctgtaatatatttatatactttttcatgaaaatggagttatcagttatctgtttgttactgcatcatctgtttgtaatcattatctcactttgtaaataaaaacacaccttaaaacatg

SEQ ID NO: 7771 - DNA, 1280 bp, Homo sapiens
ctttatcatttataggcacatgtaagcgtctagctctgtgtgcatccctaaacagcatagcgtttttaactacatggaatcatattgtgtgtgtgcctgtggctctggcttcttggtttagcattgtgagatgcactcatggtgttgcgtgtagctagagttactcgttttcactgctgtatagtgttctgttgcctataaaataccccttcagccaatgggcggcagcttgccgggattgctgtccttgccattggactatggctccgattcgactctcagaccaagagcatcttcgagcaagaaactaataataataattccagcttctacacaggagtctatattctgatcggagccggcgccctcatgatgctggtgggcttcctgggctgctgcggggctgtgcaggagtcccagtgcatgctgggactgttcttcggcttcctcttggtgatattcgccattgaaatagctgcggccatctggggatattcccacaaggatgaggtgattaaggaagtccaggagttttacaaggacacctacaacaagctgaaaaccaaggatgagccccagcgggaaacgctgaaagccatccactatgcgttgaactgctgtggtttggctgggggcgtggaacagtttatctcagacatctgccccaagaaggacgtactcgaaaccttcaccgtgaagtcctgtcctgatgccatcaaagaggtcttcgacaataaattccacatcatcggcgcagtgggcatcggcattgccgtggtcatgatatttggcatgatcttcagtatgatcttgtgctgtgctatccgcaggaaccgcgagatggtctagagtcagcttacatccctgagcaggaaagtttacccatgaagattggtgggattttttgtttgtttgttttgttttgtttgttgtttgttgtttgtttttttgccactaattttagtattcattctgcattgctagataaaagctgaagttactttatgtttgtcttttaatgcttcattcaatattgacatttgtagttgagcggggggtttggtttgctttggtttatattttttcagttgtttgtttttgcttgttatattaagcagaaatcctgcaatgaaaggtactatatttgctagactctagacaagatattgtacataaaagaatttttttgtctttaaatagatacaaatgtctatcaactttaatcaagttgtaacttatattgaagacaatttgatacataataaaaaattatgacaatg

SEQ ID NO: 7772 - DNA, 5233 bp, Homo sapiens
tgccccgcgcgctctgctacgggcccgctgggcttccgcgccttctagcttccggagcccactttgatcggggccataatacctattgagatcccctcttctgtcttgtaccttcgccactggcatcggatttgcagaagcgtgcgtgggatcagaggaccgccctccccacaacaaccggcccctgcatcttagcagccgttggaagccccagctcttttaccgccaagttcatccttgggagacagaagacgcgtgatctcctctccgctgctcttggggtctccttgcagccctggccaggcggattcatcctcaggacctaaagttgcccaaggagctcctgctctgccagaggagggtggagagggcggtgggaggcgtgtgcctgagtgggctctactgccttgttccatattatttggtgcacattttccctggcactctgggttgctagccccgccgggcactgggcctcagacactgcgcggttccctcggagcagcaagctaaagaaagcccccagtgccggcgaggaaggaggcggcggggaaagatgcgcggcgttggctggcagatgctgtccctgtcgctggggttagtgctggcgatcctgaacaaggtggcaccgcaggcgtgcccggcgcagtgctcttgctcgggcagcacagtggactgtcacgggctggcgctgcgcagcgtgcccaggaatatcccccgcaacaccgagagactggatttaaatggaaataacatcacaagaattacgaagacagattttgctggtcttagacatctaagagttcttcagcttatggagaataagattagcaccattgaaagaggagcattccaggatcttaaagaactagagagactgcgtttaaacagaaatcaccttcagctgtttcctgagttgctgtttcttgggactgcgaagctatacaggcttgatctcagtgaaaaccaaattcaggcaatcccaaggaaagctttccgtggggcagttgacataaaaaatttgcaactggattacaaccagatcagctgtattgaagatggggcattcagggctctccgggacctggaagtgctcactctcaacaataacaacattactagactttctgtggcaagtttcaaccatatgcctaaacttaggacttttcgactgcattcaaacaacctgtattgtgactgccacctggcctggctctccgactggcttcgccaaaggcctcgggttggtctgtacactcagtgtatgggcccctcccacctgagaggccataatgtagccgaggttcaaaaacgagaatttgtctgcagtggtcaccagtcatttatggctccttcttgtagtgttttgcactgccctgccgcctgtacctgtagcaacaatatcgtagactgtcgtgggaaaggtctcactgagatccccacaaatcttccagagaccatcacagaaatacgtttggaacagaacacaatcaaagtcatccctcctggagctttctcaccatataaaaagcttagacgaattgacctgagcaataatcagatctctgaacttgcaccagatgctttccaaggactacgctctctgaattcacttgtcctctatggaaataaaatcacagaactccccaaaagtttatttgaaggactgttttccttacagctcctattattgaatgccaacaagataaactgccttcgggtagatgcttttcaggatctccacaacttgaaccttctctccctatatgacaacaagcttcagaccatcgccaaggggaccttttcacctcttcgggccattcaaactatgcatttggcccagaacccctttatttgtgactgccatctcaagtggctagcggattatctccataccaacccgattgagaccagtggtgcccgttgcaccagcccccgccgcctggcaaacaaaagaattggacagatcaaaagcaagaaattccgttgttcaggtacagaagattatcgatcaaaattaagtggagactgctttgcggatctggcttgccctgaaaagtgtcgctgtgaaggaaccacagtagattgctctaatcaaaagctcaacaaaatcccggagcacattccccagtacactgcagagttgcgtctcaataataatgaatttaccgtgttggaagccacaggaatctttaagaaacttcctcaattacgtaaaataaactttagcaacaataagatcacagatattgaggagggagcatttgaaggagcatctggtgtaaatgaaatacttcttacgagtaatcgtttggaaaatgtgcagcataagatgttcaagggattggaaagcctcaaaactttgatgttgagaagcaatcgaataacctgtgtggggaatgacagtttcataggactcagttctgtgcgtttgctttctttgtatgataatcaaattactacagttgcaccaggggcatttgatactctccattctttatctactctaaacctcttggccaatccttttaactgtaactgctacctggcttggttgggagagtggctgagaaagaagagaattgtcacgggaaatcctagatgtcaaaaaccatacttcctgaaagaaatacccatccaggatgtggccattcaggacttcacttgtgatgacggaaatgatgacaatagttgctccccactttctcgctgtcctactgaatgtacttgcttggatacagtcgtccgatgtagcaacaagggtttgaaggtcttgccgaaaggtattccaagagatgtcacagagttgtatctggatggaaaccaatttacactggttcccaaggaactctccaactacaaacatttaacacttatagacttaagtaacaacagaataagcacgctttctaatcagagcttcagcaacatgacccagctcctcaccttaattcttagttacaaccgtctgagatgtattcctcctcgcacctttgatggattaaagtctcttcgattactttctctacatggaaatgacatttctgttgtgcctgaaggtgctttcaatgatctttctgcattatcacatctagcaattggagccaaccctctttactgtgattgtaacatgcagtggttatccgactgggtgaagtcggaatataaggagcctggaattgctcgttgtgctggtcctggagaaatggcagataaacttttactcacaactccctccaaaaaatttacctgtcaaggtcctgtggatgtcaatattctagctaagtgtaacccctgcctatcaaatccgtgtaaaaatgatggcacatgtaatagtgatccagttgacttttaccgatgcacctgtccatatggtttcaaggggcaggactgtgatgtcccaattcatgcctgcatcagtaacccatgtaaacatggaggaacttgccacttaaaggaaggagaagaagatggattctggtgtatttgtgctgatggatttgaaggagaaaattgtgaagtcaacgttgatgattgtgaagataatgactgtgaaaataattctacatgtgtcgatggcattaataactacacatgcctttgcccacctgagtatacaggtgagttgtgtgaggagaagctggacttctgtgcccaggacctgaacccctgccagcacgattcaaagtgcatcctaactccaaagggattcaaatgtgactgcacaccagggtacgtaggtgaacactgcgacatcgattttgacgactgccaagacaacaagtgtaaaaacggagcccactgcacagatgcagtgaacggctatacgtgcatatgccccgaaggttacagtggcttgttctgtgagttttctccacccatggtcctccctcgtaccagcccctgtgataattttgattgtcagaatggagctcagtgtatcgtcagaataaatgagccaatatgtcagtgtttgcctggctatcagggagaaaagtgtgaaaaattggttagtgtgaattttataaacaaagagtcttatcttcagattccttcagccaaggttcggcctcagacgaacataacacttcagattgccacagatgaagacagcggaatcctcctgtataagggtgacaaagaccatatcgcggtagaactctatcgggggcgtgttcgtgccagctatgacaccggctctcatccagcttctgccatttacagtgtggagacaatcaatgatggaaacttccacattgtggaactacttgccttggatcagagtctctctttgtccgtggatggtgggaaccccaaaatcatcactaacttgtcaaagcagtccactctgaattttgactctccactctatgtaggaggcatgccagggaagagtaacgtggcatctctgcgccaggcccctgggcagaacggaaccagcttccacggctgcatccggaacctttacatcaacagtgagctgcaggacttccagaaggtgccgatgcaaacaggcattttgcctggctgtgagccatgccacaagaaggtgtgtgcccatggcacatgccagcccagcagccaggcaggcttcacctgcgagtgccaggaaggatggatggggcccctctgtgaccaacggaccaatgacccttgccttggaaataaatgcgtacatggcacctgcttgcccatcaatgcgttctcctacagctgtaagtgcttggagggccatggaggtgtcctctgtgatgaagaggaggatctgtttaacccatgccaggcgatcaagtgcaagcatgggaagtgcaggctttcaggtctggggcagccctactgtgaatgcagcagtggatacacgggggacagctgtgatcgagaaatctcttgtcgaggggaaaggataagagattattaccaaaagcagcagggctatgctgcttgccaaacaaccaagaaggtgtcccgattagagtgcagaggtgggtgtgcaggagggcagtgctgtggaccgctgaggagcaagcggcggaaatactctttcgaatgcactgacggctcctcctttgtggacgaggttgagaaagtggtgaagtgcggctgtacgaggtgtgtgtcctaaacacactcccggcagctctgtctttggaaaaggttgtatacttcttgaccgtgtgggactaatgaatgcttcatagtggaaatatttgaaatatattgtaaaatacagaac

SEQ ID NO: 7773 - DNA, 2087 bp, Homo sapiens
caccacgcttcctatgtgacccgcctgggcaacgccgaacccagtcgcgcagcgctgcagtgaattttccccccaaactgcaataagccgccttccaaggccaagatgttcataaatataaagagcatcttatggatgtgttcaaccttaatagtaacccatgcgctacataaagtcaaagtgggaaaaagcccaccggtgaggggctccctctctggaaaagtcagcctaccttgtcatttttcaacgatgcctactttgccacccagttacaacaccagtgaatttctccgcatcaaatggtctaagattgaagtggacaaaaatggaaaagatttgaaagagactactgtccttgtggcccaaaatggaaatatcaagattggtcaggactacaaagggagagtgtctgtgcccacacatcccgaggctgtgggcgatgcctccctcactgtggtcaagctgctggcaagtgatgcgggtctttaccgctgtgacgtcatgtacgggattgaagacacacaagacacggtgtcactgactgtggatggggttgtgtttcactacagggcggcaaccagcaggtacacactgaattttgaggctgctcagaaggcttgtttggacgttggggcagtcatagcaactccagagcagctctttgctgcctatgaagatggatttgagcagtgtgacgcaggctggctggctgatcagactgtcagatatcccatccgggctcccagagtaggctgttatggagataagatgggaaaggcaggagtcaggacttatggattccgttctccccaggaaacttacgatgtgtattgttatgtggatcatctggatggtgatgtgttccacctcactgtccccagtaaattcaccttcgaggaggctgcaaaagagtgtgaaaaccaggatgccaggctggcaacagtgggggaactccaggcggcatggaggaacggctttgaccagtgcgattacgggtggctgtcggatgccagcgtgcgccaccctgtgactgtggccagggcccagtgtggaggtggtctacttggggtgagaaccctgtatcgttttgagaaccagacaggcttccctccccctgatagcagatttgatgcctactgctttaaacgacctgatcgctgcaaaatgaacccgtgccttaacggaggcacctgttatcctactgaaacttcctacgtatgcacctgtgtgccaggatacagcggagaccagtgtgaacttgattttgatgaatgtcactctaatccctgtcgtaatggagccacttgtgttgatggttttaacacattcaggtgcctctgccttccaagttatgttggtgcactttgtgagcaagataccgagacatgtgactatggctggcacaaattccaagggcagtgctacaaatactttgcccatcgacgcacatgggatgcagctgaacgggaatgccgtctgcagggtgcccatctcacaagcatcctgtctcacgaagaacaaatgtttgttaatcgtgtgggccatgattatcagtggataggcctcaatgacaagatgtttgagcatgacttccgttggactgatggcagcacactgcaatacgagaattggagacccaaccagccagacagcttcttttctgctggagaagactgtgttgtaatcatttggcatgagaatggccagtggaatgatgttccctgcaattaccatctcacctatacgtgcaagaaaggaacagtcgcttgcggccagccccctgttgtagaaaatgccaagacctttggaaagatgaaacctcgttatgaaatcaactccctgattagataccactgcaaagatggtttcattcaacgtcaccttccaactatccggtgcttaggaaatggaagatgggctatacctaaaattacctgcatgaacccatctgcataccaaaggacttattctatgaaatactttaaaaattcctcatcagcaaaggacaattcaataaatacatccaaacatgatcatcgttggagccggaggtggcaggagtcgaggcgctgatccctaaaatggcg

SEQ ID NO: 7774 - DNA, 5333 bp, Homo sapiens
aaggtggtggacatcccctgtcaggccaaaggtgtgccgccgccctccatcacctggtacaaggacgcagccgtggtggaggtggagaagttgacccgcttccggcagcgcaacgacgggggcctgcagatcagcggcctggtgcccgatgataccggcatgttccagtgcttcgcccgcaatgcagccggcgaggtgcaaacttccacctacctggctgtcaccagcatcgcccctaacatcaccagaggccccctggacagcacggtgatcgatggcatgtcagtggtgctagcatgtgagacctcgggggcgccccgaccagctatcacttggcagaaaggggagcgcatcttggccagtggctctgtgcagctgcctcgcttcacacccctggagtcgggcagcctcctcatcagccccacacacatctccgatgcggggacctacacctgcctggccaccaactctcggggggtcgatgaggcctcagcagacctagtcgtttgggctcggacccgcatcaccaagcccccccaggatcagagtgtcatcaagggcacccaggcctccatggtgtgcggagtgacccacgacccccgagtaaccatcaggtacatctgggagaaggacggggccaccctgggcacggagagccatcctcgtatccgcctggacagaaacggctccctgcacatctcacagacgtggtcgggagacatcggcacgtacacctgccgggtgatctcagcaggaggcaacgactctcgcagtgcccacctgcgagtcaggcaactgccccacgcgcccgagcacccagtggccactctcagcaccgtggaaaggcgagccatcaacctgacgtggaccaagccctttgatggcaacagccccctgatccgctacattctggagatgtcggagaacaatgccccctggactgtactcctggccagtgtggaccccaaagctacctcagtgacagtcaagggcctggttcctgcacgctcctaccagttccgtctttgtgccgtcaacgacgtggggaaaggacagttcagcaaagacaccgagagggtctccctccccgaggagccccccacggcccctccacagaacgtcatcgccagcggtcgaaccaaccagtccatcatgatccagtggcagccgcctcctgagagccaccagaatggaattctcaagggttacatcatcaggtactgcctggccgggctgcccgtggggtaccagtttaagaacatcacggatgctgatgtgaacaacctgctgctggaggatctcatcatttggaccaactacgagatcgaggtggctgcttacaacagcgctgggctgggggtctacagcagtaaagtcaccgagtggacgctgcagggagttcccacggtccctccgggcaatgtgcacgcggaagccaccaattccacgaccatccgcttcacctggaacgcccccagcccccagttcatcaacggcatcaaccagggctacaagctgatcgcctgggagccggaacaggaagaggaggttaccatggtgaccgcccggcctaactttcaagacagcatccacgtgggcttcgtgtctggcctgaagaagttcaccgagtacttcacctcagtgctgtgtttcaccacccccggggacgggccacgcagcaccccgcagctggtgcgcacccatgaggatgtgcctgggcccgtgggacacctgagcttcagtgagatcctggacacatcgctgaaggtcagctggcaagagccgggagagaaaaatggcatcctcacagggtaccggatctcctgggaggagtacaatcgaaccaacacccgtgtgacccactacctgcccaacgtgaccctggagtaccgtgtcacgggcctcaccgcgctcaccacctacaccatcgaggtggccgccatgacctcaaagggccagggccaagtgtccgcctccaccatctcctctggggtgcccccagaactcccagggccccccaccaacctgggcatttccaacatcggcccccgctctgtgaccttgcagttcaggccaggctacgatgggaaaacctccatctcccgctggctggtggaagcccaggtaggcgtggttggggagggagaggagtggttgctgatccaccagctctccaatgagcccgatgcccgctccatggaggtgcccgacctcaaccccttcacctgctacagcttccgcatgcgccaggtgaacatcgtgggcaccagcccccccagtcagccttctagaaagatccagaccctgcaggcaccccctgacatggccccagccaatgtgtctctgcgcacagccagtgagaccagcctgtggctgcgctggatgcctctcccggagatggaatacaatgggaaccctgagtccgtgggctataagatcaagtacagccggtcagacgggcatggcaagacgctgagccacgtggtgcaggaccgtgtggagcgggactacaccatcgaggacctggaggagtggacagagtaccgcgtccaggtccaggccttcaacgccatcgggagcgggccctggagccagacggtggtgggcaggacccgggagtcagttccctcttccggccccaccaatgtgtctgcactggccaccacctccagcagcatgctggtgcgctggagcgaggtccccgaggctgatcgcaacgggctcgtgctgggctataaggtgatgtataaggagaaggactcggacacccagccccgattctggctggtggaaggcaactcgtctcgcagtgcccagctcaccggcttgggcaaatacgtgctctatgaagtccaggtgctggccttcacacgcatcggggacggcagccccagccaccctcccatcctggagcggacgctggatgatgtcccaggaccacccatgggcatcctgttcccagaggtgcggaccacgtctgtgcggctgatctggcagccccctgccgcccccaatggcatcattcttgcttaccagatcacacaccggctcaacaccaccacggccaacaccgccactgtggaggtgctggcacccagcgcccggcagtacacagccacgggcctcaagccagagtctgtctacctgttccgcatcacggcccagacccgcaagggctggggagaagctgccgaggccttggtggtgaccaccgagaagagagaccgtccgcagccccccagcaggccgatggtgcagcaggaggatgtgagagcacgcagcgtgctgctgtcctgggagccagggagcgacgggctctcccctgtgcgctactacaccatccagacccgcgagctgcccagcggcaggtgggcactgcactcggcctccgtgagccacaatgcctccagcttcattgtggacaggctgaagcccttcacgtcctacaagttccgagtgaaggcgaccaatgacattggcgacagcgagttcagcgaggagtcggagtcactgaccaccctgcaggctgcccccgatgaagcacccaccatcctctccgtgacgccccacaccaccacctccgtgctaatccgatggcagccgccagcagaggacaagatcaatggcatcctcctgggcttccggatccgataccgggagctgctctatgaaggactgaggggcttcacgcttcgaggcatcaacaacccaggggccacatgggctgagcttacctccatgtactccatgcggaacctgagccggcccagcctcacgcagtacgagctggacaacctgaacaagcacaggcggtacgagatacggatgagcgtgtacaacgctgtgggtgaggggccctccagccccccgcaggaggtctttgttggggaggcagtgcccacagcagcacctcgtaacgtggtcgtccacggcgccacggccacacagctggacgtgacttgggagccacctccgctggacagccagaatggagacatccaggggtacaagatttatttctgggaagcccagcgggggaacctcacagagcgagtgaagacgcttttcctggctgagaacagcgtgaagctcaagaacttgactggctacacggcctacatggtcagcgtggccgccttcaacgccgctggggatgggcctcggagcacccccacccaaggccagacccagcaagcagcccccagcgctcccagctcggtcaagttcagtgagctgaccacaacctcagtgaatgtgtcctgggaagccccgcagttccccaatggcatcctggagggctacaggctggtgtacgagccctgcagccccgtggatggagtcagcaagatcgtgaccgtggacgtgaaggggaacagccccctgtggctgaaggtgaaggacctggcggagggggtgacctacaggttccgcatcagagccaagaccttcacctacgggccggagatcgaagccaacgtcaccacgggccccggagaaggtgccccaggaccgcctggcgtgcccatcatcgtgcggtacagctctgccatcgccattcactggtccagcggagacccgggcaaagggcccatcacccgctacgtcatcgaggccagaccttcaggtgcgccccgccctgctgggctgagaccccacagctcattatctcccttcttcctgggtccctccacttggggcacttgcctctgtcctccgcctgagaaggcgcttgtgctactacaggtgaagtcacctggccctgttgaggagtgggaaactgggttggggggctcctagagctggactcctagctaagtaacccccaggaggcccccagagaacggctgttagtgctaactgaggaccagcttgggttgaggattgctcaggaagccggaagcctgagcacgtggctcacgtgggtcacacaccgaatcctccacacgaccccactgatgggtgccccataactaagaagaccctggctgcctctcgaagccctgtctctgccatcatggctgtctcagtggctgctataatcgtaccagcctctcctgtcaagcctgaaattgaatcacaagaacttccaaagccatcaggagatgagtgacagataagtcagtcggggggctgctccccactgctccggtttcacccatcctgacacccgcttgctgggctctgcttactctcaggagcttgcagccactgccagctccctgcgttgctaggtttccaagttaatcagaggtgccagagtcagcaagagcaggaggcctgttctctgtatcccatggatccgcggttaggtgattaaaattgagaaggaaaac

SEQ ID NO: 7775 - DNA, 563 bp, Homo sapiens
gcatttccagcaggagctgcgagcacagtgctggctcacaacaagatgctcaaggtgtcagccgtactgtgtgtgtgtgcagccgcttggtgcagtcagtctctcgcagctgccgcggcggtggctgcagccggggggcggtcggacggcggtaattttctggatgataaacaatggctcaccacaatctctcagtatgacaaggaagtcggacagtggaacaaattccgagacgatgattatttccgcacttggagtccaggaaaacccttcgatcaggcatgcagtgacctggagttcagggaagtggcaaacagattgcgggactggttcaaggcccttcatgaaagtggaagtcaaaacaagaagacaaaaacattgctgaggcctgagagaagcagattcgataccagcatcttgccaatttgcaaggactcacttggctggatgtttaacagacttgatacaaactatgacctgctattggaccagtcagagctcagaagcatttaccttgataagaatgaacagtgtaccaaggcattcttcaattcttgtgacac

SEQ ID NO: 7776 - DNA, 1593 bp, Homo sapiens
atggaggacgactcactctacttgagaggtgagtggcagttcaaccacttttcaaaactcacatcttctcggcccgatgcagcttttgctgaaatccagcggacttctctccctgagaagtcaccactctcatgtgagacccgtgtcgacctctgtgatgatttggctcctgtggcaagacagcttgctcccagggagaagcttcctctgagtagcaggagacctgctgcggtgggggctgggctccagaatatgggaaatacctgctacgtgaacgcttccttgcagtgcctgacatacacaccgccccttgccaactacatgctgtcccgggagcactctcaaacgtgtcatcgtcacaagggctgcatgctctgtactatgcaagctcacatcacacgggccctccacaatcctggccacgtcatccagccctcacaggcattggctgctggcttccatagaggcaagcaggaagatgcccatgaatttctcatgttcactgtggatgccatgaaaaaggcatgccttcccgggcacaagcaggtagatcatcactctaaggacaccaccctcatccaccaaatatttggaggctactggagatctcaaatcaagtgtctccactgccacggcatttcagacacttttgacccttacctggacatcgccctggatatccaggcagctcagagtgtccagcaagctttggaacagttggtgaagcccgaagaactcaatggagagaatgcctatcattgtggtgtttgtctccagagggcgccggcctccaagacgttaactttacacacctctgccaaggtcctcatccttgtattgaagagattctccgatgtcacaggcaacaagattgccaagaatgtgcaatatcctgagtgccttgacatgcagccatacatgtctcagccgaacacaggacctctcgtctatgtcctctatgctgtgctggtccacgctgggtggagttgtcacaacggacattacttctcttatgtcaaagctcaagaaggccagtggtataaaatggatgatgccgaggtcaccgcctctagcatcacttctgtcctgagtcaacaggcctacgtcctcttttacatccagaagagtgaatgggaaagacacagtgagagtgtgtcaagaggcagggaaccaagagcccttggcgcagaagacaccgacaggcgagcaacgcaaggagagctcaagagagaccacccctgcctccaggcccccgagttggacgagcacttggtggaaagagccactcaggaaagcaccttagaccactggaaattccttcaagagcaaaacaaaacgaagcctgagttcaacgtcagaaaagtcgaaggtaccctgcctcccgacgtacttgtgattcatcaatcaaaatacaagtgtgggatgaagaaccatcatcctgaacagcaaagctccctgctaaacctctcttcgtcgaccccgacacatcaggagtccatgaacactggcacactcgcttccctgcgagggagggccaggagatccaaagggaagaacaaacacagcaagagggctctgcttgtgtgccagtga

SEQ ID NO: 7777 - DNA, 599 bp, Homo sapiens
actagctcattgcgcctctcctgcagtctgattggcaccggctcccattccggctccagcctccaatccgacccccatttcggctgcagcctcggacctagctccggccctcggtctatccggttgcatcctccctccctgttccggatcttatcttgcgccagcgcctactccaggatcccgtagccagacctcaagccatggctggtcccttctcccgtctgctgtccgcccgcccgggactcaggctcctggctttggccggagcggggtctctagccgctgggtttctgctccgaccggaacctgtacgagctgccagtgaacgacggaggctgtatcccccgaggcttttcccctcctccatccgtagtgttgtgtcatgggaggaaagaactgagcagatctgaagaaactgagctggccagccagaggcaactagaactattaggaaagcatagactctgaaagtccctaaagagattaccaaggtttaccctctttctaattccccctcctcccgcggagcaaagccagacatggccaactggacagctcccaggtaactgcactaggtctaggcgtctgtgccctccctc

SEQ ID NO: 7778 - DNA, 1597 bp, Homo sapiens; identical to SEQ ID NO: 843

SEQ ID NO: 7779 - DNA, 626 bp, Homo sapiens
atcattgtctattgttctccaaacagtaaaccagtatttcacactgagattgtcggctgcgggtatattccaattccccgtctcctcatgaatatgaagtgaagggctctgaccctggaagtggttctaagcagggcaaaatggggtctcggaagtgtggaggctgcctaagttgtttgctgattccgcttgcactttggagtataatcgtgaacatattattgtatttcccgaatgggcaaacttcctatgcatccagcaataaactcaccaactacgtgtggtattttgaaggaatctgtttctcaggcatcatgatgcttatagtaacaacagttcttctggtactggagaataataacaactataaatgttgccagagtgaaaactgcagcaaaaaatatgtgacactgctgtcaattatcttttcttccctcggaattgctttttctggatactgcctggtcatctctgccttgggtcttgtccaagggccatattgccgcacccttgatggctgggagtatgcttttgaaggcactgctggacggtaaggaataattccccaaaccaaggaggtcggaaaatcagaaacaccttgcctcatgctcaagctcacgctcatt

SEQ ID NO: 7780 - DNA, 1593 bp, Homo sapiens; identical to SEQ ID NO: 7776

SEQ ID NO: 7781 - DNA, 648 bp, Homo sapiens
tcctactcagttctcggttatttatgcatccgtatgagctaatggccaaagtttgccacttatgtgttgagcaccagagactaagtgatcctgatagtgataagaaccagatgagaaaaattgcacccaaaatccttcaactcctcacggaatggacggaaacatttccctatgattttcgggatgaaagaatgatgagaaacttaaaagatctggctcaccgaatagccagtggcgaagagtaaatttttctaaaattgcggaataggctgggtgcggtggctcatgcctgtaatcccagcactttgggaggctgaagcaggcagatcacctgaagtcgggagttcaagaccagcctgaccaccatggagaaaccccatttctaccaaagatacacaattagccaggtgtggtggtgcatgcctataatcccagctacttgggaggctgaggcaggagaattgcttgaacccgggaggcagaaattgtggtgagccaagatcgtgccattgcactccagcctgggcaacaagagtgaaactccgcctcaagaaaaaagaattgcaaaataaaaatctttcagcagatatgctggtaaagcattgcttctcacacttggcttatacaaggatcagctgaggagcatcc

SEQ ID NO: 7782 - DNA, 492 bp, Homo sapiens
actaagtaacaaattgttgtcttgacttgcaaattgttggtttcaaggtcaacatctgaactttctttattgctccctttaaaattaagaagtttctggattaatggtagttatcactcccaaattcagattctgcatatcagcctagctgtccctaatgtggtagtctaattagaaggaaaattgctggaataaccctgcaggtttatctcacttgtttcttgtttcccttttgaacctttcaggtacgacagtgccagcccacagggccatcctggtggcccgttgtgaagtgatggcagccatgtttaatggtaattacatggaagcaaagagtgtcctgattcccgtttatggtgtttccaaagagactttcttgtcatttttagaatacctgtacacagactcctgctgcccagctggcatattccaggccatgtgtctcctgatctgtgccgagatgtaccaagtgtccagactgcagcacatctg

SEQ ID NO: 7783 - DNA, 819 bp, Homo sapiens
ttagaggtgtggtgcttttggcagtgagtattgccttgaattcatggcaatgaattcaatccccaggggctgagagagccagtcgtgggggacagtaagggaggtttttactctttcacctgtccctgaccctgactcctcctcaccccctcctacatttccagggctgaggtagggaggatagttgtgggggtatgactcctctgtcctttgtccccagctctgggagggtctcacggaactagtgacggcgacaggcaactatggcaactaccggcgtcggctggcagcctgtgtgggcttccgcttcccgatcctgggtgtgcacctcaaggacctggtggccctgcagctggcactgcctgactggctggacccagcccggacccggctcaacggggccaagatgaagcagctctttagcatcctggaggagctggccatggtgaccagcctgcggccaccagtacaggccaaccccgacctgctgagcctgctcacggtgtctctggatcagtatcagacggaggatgagctgtaccagctgtccctgcagcgggagccgcgctccaagtcctcgccaaccagccccacgagttgcaccccaccaccccggcccccggtactggaggagtggacctcggctgccaaacccaagctggatcaggccctcgtggtggagcacatcgagaagatggtggagtctgtgttccggaactttgacgtcgatggggatggccacatctcacaggaagaattccagatcatccgtgggaacttcccttacctcagcgcctttggggacctcgaccagaacca

SEQ ID NO: 7784 - DNA, 781 bp, Homo sapiens
aacgcactcccacctgcaaatcctgctgcctctggagcagccccgaccctcctacggaaactggggccacacgcttccctctaattggacttgatctgctcggcttgcagacaccgtggaaggttcttctgggactgctgggtgctgctgcgcttgtcaccatcatcaccgtgcccgtggttctgctgaacaaaggcacagatgatgctacagctgacagtcgcaaaacttacactctaactgattacttaaaaaatacttatagactgaagttatactccttaagatggatttcagatcatgaatatctctacaaacaagaaaataatatcttggtattcaatgctgaatatggaaacagctcagttttcttggagaacagtacatttcatatggcaaagtggatctttctctccttcttgaaatgctccctgccttggctactttttagtctcctttgacgattcctcttcctctgcccatatttttaaatgatgagtttggacattctatcaatgattattcaatatctcctgatgggcagtttattctcttagaatacaactacgtgaagcaatggaggcattcctacacagcttcatatgacatttatgatttaaataaaaggcagctgattacagaagagaggattccaaacaacacacagtgggtcacatggtcaccagtgggtcataaattggcatatgtttggaacaatgacatttatgttaaaattgaaccaaatttaccaagttacagaatcacatggacggggaaagaa

SEQ ID NO: 7785 - DNA, 656 bp, Homo sapiens
agcgcggagggaggcgcgcgcgggagcgaacaccctcccggatccagagcccggcggcggcgaagcagcagctgcggccgcgcccttgccagagccggtgcgtccgcctagccccgctccgcctgaggccgtcagggctcccgaggatggaagattcccaggagacatcgccgtcctccaacaactcctcggaggagctcagctctgctctgcacctgtccaagggcatgtcgatcttcctcgacatactgaggagagcagacaaaaatgatgatggaaaattatcctttgaagaattcaaagcatattttgcagatggtgttctcagtggagaagaattacacgagcttttccataccattgatacacataatactaagtaagaaacttttttatcactggattccacaagtgaggcacagagagcgtgaatgcattcatgtccaggaagaagaaagggaagaacaatatagagggtatattttgccaagtttgcctatgcttaattctgagatacctctttagtaattaaaattgctctgaaaaattgactttgaatcagaaaataatgatcttttgtagaaagctcccctgaagtgtttttagattgttcccactttgcagaatgtaaaacaaagtataaattataaataaat

SEQ ID NO: 7786 - DNA, 739 bp, Homo sapiens
atccgactgggtgaagtcggaatataaggagcctggaattgctcgttgtgctggtcctggagaaatggcagataaacttttactcacaactccctccaaaaaatttacctgtcaaggtcctgtggatgtcaatattctagctaagtgtaacccctgcctatcaaatccgtgtaaaaatgatggcacatgtaatagtgatccagttgacttttaccgatgcacctgtccatatggtttcaaggggcaggactgtgatgtcccaattcatgcctgcatcagtaacccatgtaaacatggaggaacttgccacttaaaggaaggagaagaagatggattctggtgtatttgtgctgatggatttgaaggagaaaattgtgaagtcaacgttgatgattgtgaagataatgactgtgaaaataattctacatgtgtcgatggcattaataactacacatgcctttgcccacctgagtatacaggtacaaataataggaaatattttgccttccatcagtatatctgtttgaaagcatcattggaactatgttatatatgtttagtaaatctttttttatttgataaatggtaggtgtcttgaaaatcagatgtaatgtaaataacataaggacttaaagatagtttcagctaaccaaataaaagacccaggaatctctgttcaaacatacgcatctattataaagccatgctatccagtaataaaagaagctattttgctaaa

SEQ ID NO: 7787 - DNA, 835 bp, Homo sapiens; identical to SEQ ID NO: 6666

SEQ ID NO: 7788 - DNA, 924 bp, Homo sapiens
gagcggaggagcagtcgcagctgctttccgaggaagccggtgttgccgagattgccaaaatgctttggagtttttaactgaatctaagaaaagtccaaaatagatttgagactgtaaaaacagaaactgcagcaagggggattcagtgccaatgcatcaacaaaaaagacaaccagagttagtggaaggaaatcttcctgttttcgtgttccccacggagctcatattttatgcagatgatcagtcaacacataagcaagtgttgacactgtacaatccctatgagtttgccttaaagttcaaagtgtgattcgtcatcgagatgttcgatcctgtcactatggtgtaatagacaaattccgtctccaagtttccgagcaaagccaaaggaaggctttgggaagaaaagaggttgttgctactcttctcccatcagcaaaagaacaacaaaaggaagaagaggaaaaaagattaaaggaacatttaactgaaagtttattttttgagcagtcgtttcaaccagaaaacagagctgtatcctcaggacctagtttactaactgtcttcctgggagtggtgtgcattgcagccctgatgctgcctacactgggggatgtggaatcgctggtgcctctctacctccacttaagtgtgaatcaaaaattagtggctgcttatatcttaggtcttatcacaatggccatacttagaacatgagcaaggatttcaattgacttctgaagtaaatctgtcttgaaaatatgaatgtggactgccttttatctctatttcactccattaacatgcaacaaactattgaatgatttcaaataattgcaaatgtataatatatattttaaattataatttaatttgaaggactgcagaacattattttacagacagcaaggatgcttctgagtg

SEQ ID NO: 7789 - DNA, 880 bp, Homo sapiens
ctcgaccctgggcagggctggcggctggcgcccgcgcccggccccaacccagctgcgtgggtggggagctggagggacctcagtcctgcatttcagagtcgaggagactgggcccacgggggggaaagtgccgtgccatgggtgggtcacccaggtcttggtggggcccaagctgatactcagctgtcctcgctccctgaaagcttcgcttattacagctagcagcgtaagggatccacttagccatctcggcctccccagtcctaaaggtctaggggacagaaaaaagctgggagtcggaaggttcctcgggtccccggcatggcagacggggctggctcagaggtctgctctgtggacttggaatcgcacccatcctattagtgtgatctcagctcaaggcaaaggtgggatatcatggcatctatctgggttggacaccgaggaacagtaagagattatccagactttagcccatcagtggatgctgaagctattcagaaagcaatcagaggaattggaactgatgagaaaatgctcatcagcattctgactgagaggtcaaatgcacagcggcagctgattgttaaggaatatcaagcagcatatggaaaggagctgaaagatgacttgaagggtgatctctctggccactttgagcatctcatggtggccctagtgactccaccagcagtctttgatgcaaagcagctaaagaaatccatgaagggcgcgggaacaaacgaagatgccttgattgaaatcttaactaccaggacaagcaggcaaatgaaggatatctctcaagcctattatacagtatacaagaagagtcttggagatgacattagttccgaaacatctggtgacttccggaaag

SEQ ID NO: 7790 - DNA, 516 bp, Homo sapiens
agctccctcgcagaaaatggggcaatcgggtttgttttcaaggcaggacctgaacaaaatgtaggacacctgatctgtgggatgaagggcgctggtaatatgcacgtgtcactagctgaggccctggaggttcggggtggaccacttcaggaggaagaaatatgggctgtattaaatcaaagtgctgaaagtctccaagaattattcagaaaagtaagcctagctgatcctgctgcccttggcttcatcatttctccatggtctctgctgttgctgccatctggtagtgtgtcatttacagatgaaaatatttccaatcaggatcttcgagcattcactgcaccagaggttcttcaaaatcagtcactaacttctctctcagatgttgaaaagatccacatttattctcttggaatgacactgtattggggggctgattatgaagtgcctcagagccaacctattaagcttggagatcatctcaacagcatactgcttggaatgtgtgaggatgtt

SEQ ID NO: 7791 - DNA, 440 bp, Homo sapiens
ttggcagttaactgccaccaagtggtggttgtatgccatagctctgtaacatgaacagtgtttccaataaactgtccaccgcaaaacccgttaaaaaatgagtgagctccatgagctgaggagctagcagattgccgggattacaaagacaacgagacaggaccctttccttagcaggatttacaatctctcttttaagagcctgtgccgatggaggtgccaaccgcttatatgatatcaccgaaggagagagagaaagctttttgcctgaattcatcaatggagactttgattctattaggcctgaagtcagagaatactatgctactaaggtgttaattttctcaatattgggcacatctttcaaagaagagaaggaacctttctcaggaaggagggaagagaaaaagtcttagaagaacatagcatcaagaatattg

SEQ ID NO: 7792 - DNA, 1606 bp, Homo sapiens
gagtctcctccagatcgcagctgaaggatctgttgagcgcttcaggaaaggcggtgagatccggtaccgcagcagagcactctcagctctgggtcttgcaggcgcagggctcccccatgccagcagaaagatttcctctggtgaagaggaccgtcgaatctgtcctcctcaagacacctcttgtacagaatttattcgaatgccacggccaaggtcttccttgaaaaatgttaaccgatgtgtgctttttgtcttttgtcatcctttctttaggacaggcgacactaacaggtgaagatctcgggagaccatgactaagaaaagaattgctgtgattgggggaggagtgagcgggctctcttccatcaagtgctgcgtagaagaaggcttggaacctgtctgctttgaaaggactgatgacatcggagggctctggaggttccaggaaaatcctgaagaaggaagggccagtatttacaaatcagtgatcatcaatacttctaaagagatgatgtgcttcagtgactatccaatcccagatcattatcccaacttcatgcataatgcccaggtcctggagtatttcaggatgtatgccaaagaatttgaccttctaaagtatattcgatttaaggtagaaaattgtgtgggtatctttgtgtttgaagttgtttgccaagtaaatgaataacgtggtttcagttacctatgtttacttctaaagattggcttgatttgcacatgtatttatcctacccaggcaaaaactccattctttgtcctcctttgctcctcaaaaatattcaagggacagtctctctttcatatattttggctgcagatacaggaagccacctggcagagtgttttcattaccttcatttcacattatttgattgcaataaacagatgaagggaaatgttttccccattacagaagggaactgataggtatgggaactttaaaactctctggttccacaacttgtccattactgcttagcccttttgtactttctgaagtactttccaatatatttgtttacatgaacatcataaaaacccagtaaagtatagctcttgggtagttaactctggtgtagaggggagaacatggaattgcagaataaaaacctgaattctggtgcttgccctaccactaactaacttagatgttagacaagcaatttcctcaatttcaatttttaaaaattttcttgtttgtaaaacaagatgattgtaccagatcacttctgtggttccttcctgctctaaagtattctaggacttttctataatttctgatcacgaccataaaagaattttatggtcagatatttctgacagctggcaaaaagcccaaaccttctgccttctgatcatcctgctaagtcatgcctttttctgcttaatgacaataagaaaatgaaaacatctagtgaacttctaaagtaagtcatttacattccagtggtgcttctcttcatttatttaaacaatacttattgaacaagtttgctaccatactaagcattgaatatgcaaagacaaaaaagaaaaatcagtaactttatagtctagttaaggggataaaaatgaagaaaaa

SEQ ID NO: 7793 - DNA, 1242 bp, Homo sapiens
gaagaggaacaaaattttaaaaagatgattgagtctgagtatagtatgagactccggttgttgaatgaagagtgtgagcagaatctccagagacagcaggaatgcatatctgacttgaacctgagagaaacccttctgaatcaagcgatcaagcttgccaccgagctagaggagatgttccaggaaatgctacagagactgggccgtgtggggagagagaacatggagaaactgaaggagagtgaagccagggcttctgaacaggtccgcagcctcctaaagctcatcgtggagcttgagaaaaagtgtggggaaggcaccttggcattgctcaaggagcaagtcactgctgcttgagcatctggagcccgctcatatcacagacctgagtttatgccacataagaggactcagcagcatgttcagagtactccagactgtttatggagcgagtcacaaacacagagaagatgtttaaaactgaagctatgcacagttacctgggggcagtgaaggagaatatactacttgaaagaagaagtcccaggaccaagccctgaaagatcacaatagttagaggctgggcagaaagagatgagaggaacagtcagagataggaagaagacgtattcatgcaggtgtgaggaattcattgagcctgcgtgttctcagcgacatttaacattggatcctgaaacagctcatccctgcctggcactatctgaggacctgagaactatgagattgagacatgggcagcaggatggggctggcaacccagaaagattggatttcagtgccatggtgctggctgcggagagcttcacctcagggaggcactactgggaggtggacgtggaaaaggcaaccaggtggcaagtgggcatataccacggctctgcagacgcgaagggcagcacggccagagcttccggagagaaagtcttgctcacggggtcggtgatggggaccgagtggactctctgggtcttcccccctctgaaaaggctcttcctggaaaagaagttggacacagttggcgttttccttgactgcgaacacgggcagatatcattctacaatgtgaccgagatgtccctcatttacaatttctcccattgcgccttccaaggagctctcaggcctgtgttttccctctgtatcccaaatggagacacaagtccagactccctcaccatcttacaacatggtccttcttgtgatgctactgttagcccttaa

SEQ ID NO: 7794 - DNA, 2543 bp, Homo sapiens; identical to SEQ ID NO: 7519

SEQ ID NO: 7795 - DNA, 3168 bp, Homo sapiens
gtgaatgtagtgcccagtgtggcttgggttaccgcacattggacatctactgtgccaaatatagcaggctggatgggaagactgagaaggttgatgatggtttttgcagcagccatcccaaaccaagcaaccgtgaaaaatgctcaggggaatgtaacacgggtggctggcgctattctgcctggactgaatgttcaaaaagctgtgacggtgggacccagaggagaagggctatttgtgtcaatacccgaaatgatgtactggatgacagcaaatgcacacatcaagagaaagttaccattcagaggtgcagtgagttcccttgtccacagtggaaatctggagactggtcagagtgcttggtcacctgtggaaaagggcataagcaccgccaggtctggtgtcagtttggtgaagatcgattaaatgatagaatgtgtgaccctgagaccaagccaacatctatgcagacttgtcagcagccggaatgtgcatcctggcaggcgggtccctggggacagtgcagtgtcacttgtggacagggataccagctaagagcagtgaaatgcatcattgggacttatatgtcagtggtagatgacaatgactgtaatgcagcaactagaccaactgatacccaggactgtgaattaccatcatgtcatcctcccccagctgccccggaaacgaggagaagcacatacagtgcaccaagaacccagtggcgatttgggtcttggaccccatgctcagccacttgtgggaaaggtacccggatgagatacgtcagctgccgagatgagaatggctctgtggctgacgagagtgcctgtgctaccctgcctagaccagtggcaaaggaagaatgttctgtgacaccctgtgggcaatggaaggccttggactggagctcttgctctgtgacctgtgggcaaggtagggcaacccggcaagtgatgtgtgtcaactacagtgaccacgtgatcgatcggagtgagtgtgaccaggattatatcccagaaactgaccaggactgttccatgtcaccatgccctcaaaggaccccagacagtggcttagctcagcaccccttccaaaatgaggactatcgtccccggagcgccagccccagccgcacccatgtgctcggtggaaaccagtggagaactggcccctggggagcatgttccagtacctgtgctggcggatcccagcggcgtgttgttgtatgtcaggatgaaaatggatacaccgcaaacgactgtgtggagagaataaaacctgatgagcaaagagcctgtgaatccggcccttgtcctcagtgggcttatggcaactggggagagtgcactaagctgtgtggtggaggcataagaacaagactggtggtctgtcagcggtccaacggtgaacggtttccagatttgagctgtgaaattcttgataaacctcccgatcgtgagcagtgtaacacacatgcttgtccacacgacgctgcatggagtactggcccttggagctcgtgttctgtctcttgtggtcgagggcataaacaacgaaatgtttactgcatggcaaaagatggaagccatttagaaagtgattactgtaagcacctggctaagccacatgggcacagaaagtgccgaggaggaagatgccccaaatggaaagctggcgcttggagtcagtgctctgtgtcctgtggccgaggcgtacagcagaggcatgtgggctgtcagatcggaacacacaaaatagccagagagaccgagtgcaacccatacaccagaccggagtcggaacgcgactgccaaggcccacggtgtcccctctacacttggagggcagaggaatggcaagaatgcaccaagacctgcggcgaaggctccaggtaccgcaaggtggtgtgtgtggatgacaacaaaaacgaggtgcatggggcacgctgtgacgtgagcaagcggccggtggaccgtgaaagctgtagtttgcaaccctgcgagtatgtctggatcacaggagaatggtcagagtgctcagtgacctgtggaaaaggctacaaacaaaggcttgtctcgtgcagcgagatttacaccgggaaggagaattatgaatacagctaccaaaccaccatcaactgcccaggcacgcagccccccagtgttcacccctgttacctgagggactgccctgtctcggccacctggagagttggcaactgggggagctgctcagtgtcttgtggtgttggagtgatgcagagatctgtgcaatgtttaaccaatgaggaccaacccagccacttatgccacactgatctgaagccagaagaacgaaaaacctgccgtaatgtctataactgtgagttaccccagaattgcaaggaggtaaaaagacttaaaggtgccagtgaagatggtgaatatttcctgatgattagaggaaagcttctgaagatattctgtgcggggatgcactctgaccaccccaaagagtacgtgacactggtgcatggagactctgagaatttctccgaggtttatgggcacaggttacacaacccaacagaatgtccctataacgggagccggcgcgatgactgccaatgtcggaaggattacacggccgctgggttttccagttttcagaaaatcagaatagacctgaccagcatgcagataatcaccactgacttacagtttgcaaggacaagcgaaggacatcccgtcccttttgccacagccggggattgctacagcgctgccaagtgcccacagggtcgttttagcatcaacctttatggaaccggcttgtctttaactgaatctgccagatggatatcacaagggaattatgctgtctctgacatcaagaagtcgccggatggtacccgagtcgtagggaaatgcggtggttactgtggaaaatgcactccatcctctggtactggcctggaggtgcgagttttatagctaaggaaaattgcctccagctgcatccatattgctgcaaaggacatgatttcattattttttatggctgcatagtatttcatcatgtatacagaccacatttttaaaatccagtccaccattaatcggtacctaggttgattccacgtttgctattgtgaatagtgctgcaataaacatgtgagtgcaggtg

SEQ ID NO: 7796 - DNA, 1911 bp, Homo sapiens
tcttttgggagagagggagcagtcaggaacagggggcggaggagggatcacaattggccacaatttctgctgctaccgtggctgcctggctcgccagcgggggtcccggcttggggaaagttgcctcgaaagttggtccactcgctcacgcagacctctctcctgcatctcttgtgtctttgcgtcctgatgcaacccaggaagccaacagcgaaaagaccaataacggaattcactaccggcttcagcttctctacagcaatgggataaggacggagcaggatttctacgtgcgcctcattgactccatgacaaaacaagccatagtgtatgaaggccaagacaagaacccagaaatgtgccgagtcttgctcacacatgagatcatgtgcagccgctgttgtgacaagaaaagctgtggcaaccgaaatgagactccctcagatccagtgataattgacaggttcttcttgaaatttttcctcaaatgtaaccaaaattgcctaaagaatgcgggaaacccacgtgacatgcggagattccaggtcgtggtgtctacgacagtcaatgtggatggccatgtcctggcagtctctgataacatgtttgtccataataattccaagcatgggcggagggctcggaggcttgacccctcggaaggtacgccctcttatctggaacatgctactccctgtatcaaagccatcagcccgagtgaaggatggacgacgggaggtgcgactgtgatcatcataggggacaatttctttgatgggttacaggtcatattcggtaccatgctggtctggagtgagttgatcactcctcatgccatccgtgtgcagacccctcctcggcacatccctggtgttgtggaagtcacactgtcctacaaatctaagcagttctgcaaaggaacaccaggcagattcatttatacagcgctcaacgaacccaccatcgattatggtttccagaggttacagaaggtcattcctcggcaccctggtgaccctgagcgtttgccaaaggaagtaatactcaaaagggctgcggatctggtagaagcactgtatgggatgccacacaacaaccaggaaatcattctgaagagagcggccgacattgccgaggccctgtacagtgttccccgcaaccacaaccaactcccggcccttgctaacacctcggtccacgcagggatgatgggcgtgaattcgttcagtggacaactggccgtgaatgtctccgaggcatcacaagccaccaatcagggtttcacccgcaactcaagcagcgtatcaccacacgggtacgtgccgagcaccactccccagcagaccaactataactccgtcaccacgagcatgaacggatacggctctgccgcaatgtccaatttgggcggctcccccaccttcctcaacggctcagctgccaactccccctatgccatagtgccatccagccccaccatggcctcctccacaagcctcccctccaactgcagcagctcctcgggcatcttctccttctcaccagccaacatggtctcagccgtgaaacagaagagtgctttcgcaccagtcgtcagaccccagacctccccacctcccacctgcaccagcaccaacgggaacagcctgcaagcgatatctggcatgattgttcctcctatgtgaaagaattgccttgaagaattgtattaatgaagaggttggattctgctacagagagtaatctgatacaagtcccagagtggaacttttaactcaggcctttttaagaggaatcacaataactgcagatttttaaacaaacaaaatcaccgaccttgcaaatactgaaattggaagagggatctgcaagtgcagggtgttggttaaagttgtacctcccaagtatttg

SEQ ID NO: 7797 - DNA, 1163 bp, Homo sapiens
aggactgatgtctgaattaactaaatgaacttgtctggtttgcagagtgctgatggcagagattggtgaggatttggataaatctgatgtgtcctcattaattttcctcatgaaggattacatgggccgaggcaagataagcaaggagaagagtttcttggaccttgtggttgagttggagaaactaaatctggttgccccagatcaactggatttattagaaaaatgcctaaagaacatccacagaatagacctgaagacaaaaatccagaagtacaagcagtctgttcaaggagcagggacaagttacaggaatgttctccaagcagcaatccaaaagagtctcaaggatccttcaaataacttcaggctccataatgggagaagtaaagaacaaagacttaaggaacagcttggcgctcaacaagaaccagtgaagaaatccattcaggaatcagaagcttttttgcctcagagcatacctgaagagagatacaagatgaagagcaagcccctaggaatctgcctgataatcgattgcattggcaatgagacagagcttcttcgagacaccttcacttccctgggctatgaagtccagaaattcttgcatctcagtatgcatggtatatcccagattcttggccaatttgcctgtatgcccgagcaccgagactacgacagctttgtgtgtgtcctggtgagccgaggaggctcccagagtgtgtatggtgtggatcagactcactcagggctccccctgcatcacatcaggaggatgttcatgggagattcatgcccttatctagcagggaagccaaagatgttttttattcagaactatgtggtgtcagagggccagctggaggacagcagcctcttggaggtggatgggccagcgatgaagaatgtggaattcaaggctcagaagcgagggctgtgcacagttcaccgagaagctgacttcttctggagcctgtgtactgcggacatgtccctgctggagcagtctcacagctcaccatccctgtacctgcagtgcctctcccagaaactgagacaagaaaggtgagcccccaggaggtggtcagttccggaccacctgcttattttcgtgccaccaggatgggaattaccactgtgccacatttgctgcccatctc

SEQ ID NO: 7798 - DNA, 571 bp, Homo sapiens
aaagcagaagcctggatatgtgtttcacctcatttccatttcataccctggtcttaaccttcaagttggtgctattcaattcagggaaccccaggattacctggcccaccaggaccaatgggacctccaggagacagaggcttcactggaaaagacggtgcaatgggacccaggggcccaccagggccgccgggaagcccaggctccccaggagtcacaggaccaagtgggaagccaggaaaacctggagatcatggcagaccaggtccatctgggttgaaaggagaaaaaggtgataggggagacattgcttcccagaacatgatgcgagcagttgcaagacaagtctgtgaacaattgataagtggtcagatgaacagattcaatcagatgctgaatcagattccaaatgattaccagtccagtcgcaaccagccaggcccgccgggtccaccgggacctcctggtagcgcaggagccagaggagaacctgggcctggggggcggccaggcttcccgggcacaccagggatgcagggaccccctggggaacgaggtttgccaggagaga

SEQ ID NO: 7799 - DNA, 714 bp, Homo sapiens
tgtggagctgccagagtaaagcaaagagaaaggaagcaggcccgttggaagtggttgtgacaaccccagcaatgtggagaagcctggggcttgccctggctctctgtctcctcccatcgggaggaacagagagccaggaccaaagctccttatgtaagcaacccccagcctggagcataagagatcaagatccaatgctaaactccaatggttcagtgactgtggttgctcttcttcaagccagctgatacctgtgcatactgcaggcatctaaattagaagacctgcgagtaaaactgaagaaagaaggatattctaatatttcttatattgttgttaatcatcaaggaatctcttctcgattaaaatacacacatcttaagaataaggtttcagagcatattcctgtttatcaacaagaagaaaaccaaacagatgtctggactcttttaaatggaagcaaagatgacttcctcatatatgatagactctcaaagatgaagacttttgtaaacgtgtatctttggctactgtggataaaacagttgaaactccatcgcctcattaccatcatgagcatcatcacaatcatggacatcagcaccttggcagcagtgagctttcagagaatcagcaaccaggagcaccaaatgctcctactcatcctgctcctccaggccttcatcaccaccataagcacaagggtcagcatag

SEQ ID NO: 7800 - DNA, 499 bp, Homo sapiens
gacttccgggtcgcggtgcttgaagggagtgttccgtcgtttccgttgccggctgtttgcagtggggaaaccgaggcagctcctgctccccctagttcttccgctcctgtgaggaaaaaaaaatgtttatttctttgtgggagttcttctatgggcacttttttcgattttggatgaaatggctattacgacagatgactgggaagtgtgaattgcagcgaatatttgatacctatgtaggtgcacaaaggacacacaggatagaaaattccttgacatactccaagaataaggtaggataacataaaggtggtaactctagaaaacttaacgtggacatattttttcttaaaaaaaaaaaagtgccctgctagaagagtgttttctatagtgagcattgagtgaaattttccccgtttagaggtaatattctgttttcaaacatttctctatatatgtgtttttcgtgtgtatttcaaagaaaatacttgaataattt

SEQ ID NO: 7801 - DNA, 568 bp, Homo sapiens
agcaggaggaggcagagcacagcatcgtcgggaccagactcgtctcaggccagttgcagccttctcagccaaacgccgaccaaggaaaactcactaccatgagaattgcagtgatttgcttttgcctcctaggcatcacctgtgccataccagttaaacaggctgattctggaagttctgaggaaaagcagctttacaacaaatacccagatgctgtggccacatggctaaaccctgacccatctcagaagcagaatctcctagccccacagaatgctgtgtcctctgaagaaaccaatgactttaaacaagaggtaagttctcattttcaatcagaggcccatcatgccttgaagagatgaaagaaggcattgcctggattctcttctgatgaaatttcattagcaagttttccagctaattggcagtctaaaacttgctcataaataaaacatgtatttactaaatatcagaaatactaggtttcctcggataagtttagcattacagaagatgtttattaatgcctgttatttgaaacattaatctgcttgcaatttatttaagg

SEQ ID NO: 7802 - DNA, 1977 bp, Homo sapiens
gcctcccgccctctctcttgctggccgcacgccccggccccgcgcacctccgcccggctccgcagccgctacccgcgcttcgttgccctgtgggactccgagcgagcccggagggaaccctcctcttcttctgggggcgacttttgtttgcttgcctgtttctttctggtgacttttgcagctttccaatatccgtcttcggagcgcacgggaatccgccgagctctgcgtgcaggcccttttttcttttgaggttcacattttttgaaattttacgccagggcttttgtaatttcctcccccgcccgctgacggtcctggagtcgctcggggctttaggccggttatgcaacgtgtaccgctcggggctgccggctgcacctccgccgcgcctcgccgctcactgcgctagacccggcgccccgcgtctcgcttcgcgggcagtcagggggccggcgctctgtcgaggtctccagctagagcagggagcccgagcccgagggagtccccggagccgacgaagggcttattagaccctgactcttttctgaggcgcgcagattttgtctttgatcactccctctccgcgggtctacggccgcgcgctttcggcgccggcgatggggagaagacggaggctgtgtctccagctctacttcctgtggctgggctgtgtggtgctctgggcgcagggcacggccggccagcctcagcctcctccgcccaagccgccccggccccagccgccgccgcaacaggttcggtccgctacagcaggctctgaaggcgggtttctagcgcccgagtatcgcgaggagggtgccgcagtggccagccgcgtccgccggcgaggacagcaggacgtgctccgagggcccaacgtgtgcggctccagattccactcctactgctgccctggatggaagacgctccctggaggaaaccagtgcattgtcccgatttgtagaaatagttgtggagatggattttgttcccgtcctaacatgtgtacttgttccagtgggcaaatatcatcaacctgtggatcaaaatcaattcagcagtgcagtgtgagatgcatgaatggtgggacctgtgcagatgaccactgccagtgccagaaaggatatattggaacttattgtggacaacctgtctgtgaaaatggatgtcagaatggtggacgttgcatcggacccaaccgctgtgcttgtgtttatgggttcactggtccacagtgtgaaagagattacaggacaggcccgtgtttcactcaggtcaacaaccagatgtgccaagggcagctgacaggcattgtctgcacgaagactctgtgctgtgccaccattggacgggcgtggggccatccctgtgagatgtgtccagcccagcctcagccctgccgacggggtttcatccccaacatccgcactggagcttgccaagatgttgatgaatgccaggctatcccagggatatgccaaggaggaaactgtatcaatacagtgggctcttttgaatgcagatgccctgctggtcacaaacagagtgaaactactcagaaatgtgaaggtgagtctctctactttgggaagcatgcctaattgtgactttaatgcaagaaaaacaggacttcatttgaaattttgaagactactggtcacaattaaaactctttatctactatgaaagcataggtttaagcctagagtagttctgtgtttgtgtattgtagccttagtgggtttgatttgaaaagagtcaatgagcatttgcatctagtttgttatctcagttgtgttgcattgagaatgggagtaatccagccatttatgtttcttcttaataaagtaggtttccatttcacttataaagttatatcaaaaacgaaaattgagatagaaataagaagtccaagtgaaatacagtatcatgtgtaaatgatgtgttagtagttggcaccgtgtcatatattat

SEQ ID NO: 7803 - DNA, 755 bp, Homo sapiens
gaacaccacccagtgtggagcagcccagccaagcactgtcaggaatcctgtgaagcagctccagctatgtgtgaagaagaggacagcactgccttggtgtgtgacaatggctctgggctctgtaaggccggctttgctggggacgatgctcccagggctgttttcccatccattgtgggacgtcccagacatcaggtgaggaaaattatgattggaacataacaggacacagattaggttcctctgtgttcatgtttatccccagattgtctatctctttctgcccagaagttatgtaaccttgttacaaatagacctctaatgattaaggtccaggagtaaatgccaatttcacatataatgtagacagattatctgatgggcatctatcagatacaaagtctgcccctttttcatgtcctttttgtctaaatatagtcattatcatcatcatcatcatcatcaaatcatttcatcaccatcagaaatgcttatacattatcctgatgtataccaaagctactgtttggaaagaaactaaaataaaagtccaggtcacttaaccatacagggctgatgttagatgaaagcaagcatcgataccaaatgcaattttacataatattacctgtcaacaaaatatatttggacagccgcatggtaattttacacattatgtgtaaacaaagtattggtggcatcacatggtaaaaactcagtaatttcacctcagaaattcttcttcacatcagaaa

SEQ ID NO: 7804 - DNA, 654 bp, Homo sapiens
gagggtggggggaggaagagacagtgcctcgataaactccaaaaggggaggggagggggcgctgggcgagtgggcttcctataattactattatcaatttgcccgagtgtgcttcatccaggggctgtttcgcgttgtttgtttgtttgtttcctctgggaattggggggtggggggatgagaaaagatgagaacgaaaagaaaacctcgcctcaccccaagttcccgagccgggggctgaggacttttcgaaggaaagggtccgcctagccctgagtcaagcggtcttactgtaccgccgtgtgcattccctcatacgatcgagcctgcgtgctgccgaagcagggcgccgagtccatgcgaactgccatctgatccgctcttatcaatgaagcagccgatcatggcggatggcccccggtgcaagaggcgcaaacaagccaatcccaggaggaaaaacgaggttaccttttcccgatggtgcaaaatcgacttgacataactgttcatcagtttcagggttttccctggaggtatttgcatcaaatcagcccagtcaagcttcaagttgaaattggcaggccagaaactcacagggtagagactggaaaagagacagccaaagtacaggcagcaaactgacagcagcagagt

SEQ ID NO: 7805 - DNA, 846 bp, Homo sapiens
tgtggacaaggggaggagagaaatcagaggtggcgcgcgaaggctgagcgcccaggcagccagagcccagatcggaagagccgagtccgggcagaggggtccgcgggctctggaggtgctggacgggtgcgatccgagagcagaccggggccctcgcgagcctctcccggcccctgcccgcgatgagcgaggccagccgactgtgctccggctactacagcctcaaccagagcttcgtggagcccttccagtgcccccggcgcggcgagggggcagcgctccagtattgctgcggcttcgccgacctcaagtactgctgcagcgagccgggcagctacttcccctacaagcacagctacatgtggagcctcaggtcaaacttgtcagtgtcctaatcccagagaaagagcagaagcctaaaggcaagccaggaagataatgaagaaaaagatcattacttttcaatgacgtatgttccaaatacagcattggtgccttgattggactaggaattgctgcccttgttttactcgcctttgtcatcagtgtctgtgtcctttgctatttatttctgtatacgaaacctcaaagattagacactggccttaagcttcaacacttagaggcttcttccactcaagaaggcaagtcaaatggaaaaaccaaagccctcaattcaaatgcagcatcaaatgcaacaaatgaaacatactatgaagctgatgatataattcaagaaaaaacaatggatgcaacacaaatccacattgcttattaactaaaaattctgtgttttaaatgcttactggagagatgggacaataaaaataaagcgtgcacttgaaa

SEQ ID NO: 7806 - DNA, 1719 bp, Homo sapiens
gtctgctatcatttaccttatggattcctgtatatgcaaccctgcccatgctgcatattagaaacttctgctcagcttttaaaaaatactggtgttctggccaacttcacttaagaccagttaaattcgaatcttggttggcgtggctctgggcaatggcgtttattaaaagctccccggaaactgaaaaaacaacctgaaagttggcaaagaaaggattctgtggtttttctaagtctctcaagccagtggacagccacggcactcagcataattgggctgattactctgagtgcaaaccttttcactgttccagagaggagcctgacaaccacattctccttctcaaggttttgaaagagttgcaaaatttatcaaatgcaaatgttgactcaaggaatggaactgacagataggtggtccagtgactttggctcaacatgcctcagaaccacggttgatttgagaaatccagtgattcagcacagaggaaaccagctagccgcagtcactgagggaatggggtgcagccaggccagctctgcctgcttgtcattacttacctttcatttgatcaaaaacaatgcaatttactcgcaggtcctggccctacacaacagatataagagttcggaccgcccagcacacaaggtcagcatgctgctcctctgtcacgctctcgctatagctgttgtccagatcgttatcttctcagaaagctgggcatttgccaagaacatcaacttctataatgtgaggcctcctctcgaccctacaccatttccaaatagcttcaagtgctttacttgtgaaaacgcaggggataattataactgcaatcgatgggcagaagacaaatggtgtccacaaaatacacagtactgtttgacagttcatcacttcaccagccacggaagaagcacatccatcaccaaaaagtgtgcctccagaagtgaatgtcattttgtcggttgccaccacagccgagattctgaacatacggagtgtaggtcttgctgtgaaggaatgatctgcaatgtagaattacccaccaatcacactaatgcagtgtttgccgtaatgcacgctcagagaacatctggcagcagtgcccccacactctacctaccagtgcttgcctgggtctttgtgcttccattgctgtgatgccaccattcctaggagaggcagagaccagcctctaaagcacaagccaaaaactgtgtgaacggtgaactttggagtgaagatcaatcttgcacttggtgaagagtgcacattggacctcaaggcgaaagccagtggtttgcttggataaaatgttcccgcatgaggccacaggactgaggatgggaatttggcagggcctgagaagatggtctgacttccaggcttcctggtcaaagagagctacgtttgggcagttctgcagagaggatcctggcaactagtcccacctgactaggcctttagctgaaaggatttcttgacctccttgactgcctcagaggctgccaggtcaaaccctcttgtttatgtgattagctcagagcatctctatgaaatctaacccttcccctcatgagaaagcagttttccccaccaacagcatagtcaatgagaaaggcaactgtacgaagaaaacttccagtggaactaatatgaaatctatttgcaaattatggggggaaataaagcttttaaattatacaatgtaaa

SEQ ID NO: 7807 - DNA, 4935 bp, Homo sapiens
atgtggccatcgcagctactaattttcatgatgctcttagctccaataattcatggtggcaagcacagtgaacgacatcctgcccttgctgctccattgcgacacgctgagcgcagcccaggaggcgctcttccacccagacatctgcttcagcagccagctgcagagcgcaccgctgctcatcgtggacaagggccccgtggagctaccagaggagttcgcggtccaggtgcccaaggagcacagattgcagcgcaagctttcagccgtgccccaattccaatggctgtggtccgcagagagctatcctgtgagagctatcctatagagcttcgctgtccaggaacagacgtcatcatgatagaaagtgccaactatggcaggactgatgacaaaatttgtgactctgaccctgctcagatggagaatatccgatgttatctgccagatgcctataagattatgtctcaaagatgcaataacagaacccagtgtgcagtggtggcaggtcctgatgtttttccagacccgtgtccaggaacctataaataccttgaagtgcagtatgaatgtgtcccttacaaagtggaacaaaaagtttttctttgtcctggactactaaaaggagtataccagagtgaacatttgtttgagtccgaccaccaatctggggcgtggtgcaaagaccctctgcaggcatctgacaagatttattatatgccctggactccctacagaactgataccctgactgagtattcatccaaggatgacttcattgctggaagaccaactacaacctacaagctccctcacagggtggatggcacaggatttgtagtgtatgatggagctttgttcttcaacaaagagcgcaccaggaacatagtaaagtttgatttgcggactaggataaagagtggagaggctatcatagcaaatgccaattaccatgatacctccccttaccgatggggaggcaaatctgacatagacctggcagtagatgagaatgggctatgggtaatctatgcaacagaacaaaacaatggtaaaattgtcattagtcaattgaacccttacaccctacggatcgaaggaacatgggatactgcatatgataaaaggtcagcttccaatgcctttatgatttgtggaattctgtatgtggtcaaatctgtatatgaggatgatgacaatgaggctactggaaataagattgactacatttacaacactgaccaaagcaaggatagtttggtggatgtaccctttcctaattcataccagtacattgcagctgtggattacaaccccagggacaacctactttatgtatggaataactatcacgtcgtgaaatattctttggattttggacctctggatagtagatcagggcaggcacatcatggacaagtttcatacatttctccgccaattcaccttgactctgagctagaaagaccctctgttaaagatatctctaccacaggacctcttggcatgggaagcactaccaccagtaccacccttcggaccacaactttgagcccaggaaggagtaccaccccgtcagtgtcaggaagaagaaaccggagtactagtaccccatctccagctgtcgaggtacttgatgacatgaccacacaccttccatcagcatcgtcccaaatcccagctctcgaagagagctgtgaggctgtggaagcccgagaaatcatgtggtttaagactcgtcaaggacagatagcaaagcagccatgccctgcaggaactataggtgtatcaacttatctatgccttgctcctgatggaatttgggatccccaaggtccagatctcagcaactgttcttctccttgggtcaatcatataacacagaagttgaaatctggtgaaacagctgccaacattgctagagagctggctgaacagacaagaaatcacttgaatgctggggacatcacctactctgtccgggccatggaccagctggtaggcctcctagatgtacagcttcggaacttgaccccaggtggaaaagatagtgctgcccggagtttgaacaagcttcagaaaagagagcgctcttgcagagcctatgtccaggcaatggtcgagacagttaacaacctccttcagccacaagctttgaatgcatggagagacctgactacgagtgatcagctgcgtgcggccaccatgttgcttcatactgtggaggaaagtgcttttgtgctggctgataaccttttgaagactgacattgtcagggagaatacagacaatattaaattggaagttgcaagactgagcacagaaggaaacttagaagacctaaaatttccagaaaacatgggccatggaagcactatccagctgtctgcaaataccttaaagcaaaatggccgaaatggagagatcagagtggcctttgtcctgtataacaacttgggtccttatttatccacggagaatgccagtatgaagttgggaacggaagctttgtccacaaatcattctgttattgtcaattcccctgttattacggcagcaataaacaaagagttcagtaacaaggtttatttggctgatcctgtggtatttactgttaaacatatcaagcagtcagaggaaaatttcaaccctaactgttcattttggagctactccaagcgtacaatgacaggttattggtcaacacaaggctgtcggctcctgacaacaaataagacacatactacatgctcttgtaaccacctaacaaattttgcagtactgatggcacatgtggaagttaagcacagtgatgcggtccatgacctccttctggatgtgatcacgtgggttggaattttgctgtcccttgtttgtctcctgatttgcatcttcacattttgctttttccgggggctccagagtgaccgtaacaccatccacaagaacctctgcatcagtctctttgtagcagagctgctcttcctgattgggatcaaccgaactgaccaaccaattgcctgtgctgttttcgctgccctgttacatttcttcttcttggctgccttcacctggatgttcctggagggggtgcagctttatatcatgctggtggaggtttttgagagtgaacattcacgtaggaaatacttttatctggtcggctatgggatgcctgcactcattgtggctgtgtcagctgcagtagactacaggagttatggaacagataaagtatgttggctccgacttgacacctacttcatttggagttttataggaccagcaactttgataattatgcttaatgtaatcttccttgggattgctttatataaaatgtttcatcatactgctatactgaaacctgaatcaggctgtcttgataacatcaagtcatgggttataggtgcaatagctcttctctgcctattaggattgacctgggcctttggactcatgtatattaatgaaagcacagtcatcatggcctatctcttcaccattttcaattctctacagggaatgtttatatttattttccattgtgtcctacagaagaaggtacgaaaagagtatgggaaatgcctgcgaacacattgctgtagtggcaaaagtacagagagttccattggttcagggaaaacatctggttctcgaactcctggacgctactccacaggctcacagagccgaatccgtagaatgtggaatgacacggttcgaaagcagtcagagtcttcctttattactggagacataaacagttcagcgtcactcaacagaggagccatggctaatcatcttataagcaatgctctgcttcgtccgcatggtactaacaatccctataatacattgcttggggaaccggcggtctgtaacaacccttctgtcagcatgtacaacgcacaagaggggcttctgaacaatgccagggatacaagtgtcatggatactctaccactgaatggtaaccatggcaatagttacagcattgccagcggcgaatacctgagcaactgtgtgcaaatcatagaccgtggctataaccataacgagaccgccctagagaaaaagattctgaaggaactcacttccaactatatcccttcttacctgaacaaccatgagcgctccagtgaacagaacaggaatctgatgaacaagctggtgaataaccttggcagtggaagggaagatgatgccattgtcctggatgatgccacctcgtttaaccacgaggagagtttgggcctggaactcattcatgaggaatctgatgctcctttgctgcccccaagagtatactccaccgagaaccaccagccacaccattataccagaaggcggatcccccaagaccacagtgagagctttttccctttgctaaccaacgagcacacagaagatctccagtcaccccatagagactctctctataccagcatgccgacactggctggtgtggccgccacagagagtgttaccaccagcacccagaccgaacccccaccggccaaatgtggtgatgccgaagatgtttactacaaaagcatgccaaacctaggctccagaaaccacgtccatcagctgcatacttactaccagctaggtcgcggcagcagtgatggatttatagttcctccaaacaaagatgggacccctcccgagggaagttcaaaaggaccggctcatttggtcactagtctatagaagatgacacagaaattggaaccaacaaaactgctaacaccttgttgactgttctgagttgatataagcagtggtaataatgtgtgtactcctaaatctttatgctgtcctctaaagacaaacacaaactctcagacttttttttttttaatgggatttttaggtcagcccaggggagaaagataactgctaaaattcccctgtaccccatcctttctt

SEQ ID NO: 7808 - DNA, 416 bp, Homo sapiens
tcctttccactagaagcgaggtgtgtactgcgtgcatgtttgctgagcgctcaccacgggctaggctccatgcccagttcctgtgaggagaaaacacgtttctatgtgcccggcaggtaggaggcactcacaaaatgttactttgtctttacagaattttctgaaggagagataaaaactgagttaaataaagatgatcagaatggatgagaaataactttagacattatttcattgaaccttcccaactgaaattattttatgatgttataacatggatagtaactcaagtagcaataagttacacagttgtgccatttgtgcttctttctataaaaccatcactcacgttttacagctcctggtattattgcctgcacattcttggtatcttagtattattgttgttgccagtg

SEQ ID NO: 7809 - DNA, 799 bp, Homo sapiens
gtggagctgccagagtaaagcaaagagaaaggaagcaggcccgttggaagtggttgtgacaaccccagcaatgtggagaagcctggggcttgccctggctctctgtctcctcccatcgggaggaacagagagccaggaccaaagctccttatgtaagcaacccccagcctggagcataagagatcaagatccaatgctaaactccaatggttcagtgactgtggttgctcttcttcaagccagctgatacctgtgcatactgcaggcatctaaattagaagacctgcgagtaaaactgaagaaagaaggatattctaatatttcttatattgttgttaatcatcaaggaatctcttctcgattaaaatacacacatcttaagaataaggtttcagagcatattcctgtttatcaacaagaagaaaaccaaacagatgtctggactcttttaaatggaagcaaagatgacttcctcatatatgataggtttgtacatacacacaaacacatcccaaatttaaaaataactgtttcgtatctatttatttacttcccatcacacataacaatcttctttactgttaaatacaatgccatatttcagtcttcatctcatataatctctctttaacatttagaagtaaaaatcactccttatttttgaaatactctcattttaaaaaatttctatgacactataccctgctggttttcctcatatccttcctcttctttctcctcctccacacttcctcctcttccacctcctgatttttcttcctcccacattcttccttgg

SEQ ID NO: 7810 - DNA, 432 bp, Homo sapiens
gtttttctggagaagatactgtatattgggttaccagcggaaacatcagtatgactggggtctctagattcctagtccagttttctctcttccatacaacagtgacatatacttggtcttcttccatttttctcttgttggtccaagcatatttttacatgttttaaaatgttttctgccaggcacattgcaagcaacccgtgccttgatggtggttggcatcctcctgggagtgatagcaatctttgtggccaccgttggcatgaagtgtatgaagtgcttggaagacgatgaggtgcagaagatgaggatggctgtcattgggggtgcgatatttcttcttgcaggtctggctattttagttgccacagcatggtatggcaatagaatcgttcaagaattctatgaccctatgaccccagtcaatgccag

SEQ ID NO: 7811 - DNA, 614 bp, Homo sapiens
attcggcattgggcttgctttgtttcctgccaggcccagcattttcttctaccagatcggcaggcttgtgggcttcttcctaggtccctcccctgcactctgaataggaaagctggaagctgtgctttagagaagctttaagacgccgaaagaaaccagaagagtggcatggaatattcacatgggagagccgcatgaggccgcccaccacgcttcctgaaggatgcccgtgtggaagaattttgacgtgccagtgtcctcgttctacagggtgttccattcttccgcaatctcagaaaaatgggactaaaagaaactattttgtaaaataagaagacttccatttttaatgaccaacatgtattaagatggacacctactctacgaaacacgaagttctatggtctcgaagaagcccgtgcctgtttaaaactgatcctaactaaaaacagacttgagtggatatgagaatgttggttagtggcagaagagtcaaaaaatggcagttaattattcagttatttgctacttgttttttagcgagcctcatgtttttttgggaaccaatcgataatcacattgtgagccatatgaagtcatattcttacagatac

SEQ ID NO: 7812 - DNA, 819 bp, Homo sapiens
aatatgacacacaattgacactgaccagaaacacagcgccaaggacactctagtcctagccatgaaatgttatgattccaggttttcaggacagagcagagtccacttctcatctccagtatccgtaaaaatttgtccaaaatctgcctgccaatcacggagccagaggctgaggggaggctttgagccggtctgcgagtccggaaggcaaagatcgcgaagcttggcgctccagaacgctcagggggcaggtagcgctggtggattggaatcttgaagcaggtgtacagtgtaaagctgccctggatgagcagtttgaacctcagaagactctgttcatccagtgcgatgtggctgaccagcaacaactgagagacacttttagaaaagttgtagaccactttggaagactggacattttggtcaataatgctggagtgaataatgagaaaaactgggaaaaaactctgcaaattaatttggtttctgttatcagtggaacctatcttggtttggattacatgagtaagcaaaatggaggtgaaggcggcatcattatcaatatgtcatctttagcaggactcatgcccgttgcacagcagccggtttattgtgcttcaaagcatggcatagttggattcacacgctcagcagcgttggctgctaatcttatgaacagtggtgtgagactgaatgccatttgtccaggctttgttaacacagccatccttgaatcaattgaaaaagaagaaaacatgggacaatatatagaatataaggatcatatcaaggatatgattaaatactatggaattttgg

SEQ ID NO: 7813 - DNA, 707 bp, Homo sapiens
cccggccccgcgcgcagtccagcggccccgcgtgtgtgccctcgccctgccggagccgggaaaatggaggctgtgattgagaaggaatgcagcgcgctcggaggcctcttccagaccatcatcagcgacatgaaggggagctatccagtttgggaagatttcataaacaaagcaggaaagctgcagtcccagcttcggacaacagtagtagcagcagctgccttcttggacgcctttcagaaagtggctgacatggccaccaacacacgtggtaagcagatggaggctgactcccagtgttaactgcattctgcacgtggactcttccccttgggtggctgcacaagaagatgcagcttaagttatcagagctgagctgactcgtattttcccattttttaaaactctgtgggattccacatattagaagttgcaactagttttctggataataaagcacatgtgaagaagaatgaaaaaggaagaaaatgaaccactgtttctgcacgagttggcttgatgggttctttgatcactttaatgacgtgctggttgttgaaccttgagctgtgcctttggttgcaatttgcgttttcctccttacgtgggttttccttgtttccttgtggaatgggaagcagtagggatgattggatagaccatttttctgagtttccataaaatgaagaacccttttaaaataagga

SEQ ID NO: 7814 - DNA, 515 bp, Homo sapiens
atacgcgaagtaatgagcaaggagcagctgagtttttctttctcttcccttttctcttcctctttgagatatttcccactttcccttgttaaataaatgatctgtctctttgcaggatagtgacaacctctggtgggacgcctttgccactgaattttttgaagatgacgccacattaaccctttcattttgtttggaagatggaccaaagcgatacactatcggcaggaccctcatcccccgttactttagcactgtgtttgaaggaggggtgaccgacctgtattacattctcaaacactcgaaagagtcataccacaactcatccatcacggtggactgcgaccagtgtaccatggtcacccagcacgggaagcccatgtttaccaaggtatgtacagaaggcagactgatcttggagttcacctttgatgatctcatgagaatcaaaacatggcactttaccattagacaataccgagagttagtcccgagaagcatcctagccatgcatg

SEQ ID NO: 7815 - DNA, 593 bp, Homo sapiens
ctgaggtaacacctcatgcttttaccccatcctccagacaacaggatttggtctccacggtcaacgtggtatactcgcagacaacccaaccggtatacaatggtttgaccatttcctatgcaagtgagaaatatgaaccagttttgttaaaaagtgaaagttcccaccaagtggtaccttctttgtacagtaatgatgagttgttccaaacggccaatttggagattaaccaggcccatcccccaaaaggaaggcatgtatttgctacacctgttttatcaattgatgaaccattaaatacactaataaataagcttatacattccgatgaaattttaacctccaccaaaagttctgttactggtaaggtatttgctggtattccaacagttgcttctgatacatttgtatctactgatcattctgttcctataggaaatgggcatgttgccattacagctgtttctccccacagagatggttctgtaacctcaacaaagttgctgtttccttctaaggcaacttctgagctgagtcatagtgccaaatctgatgccggtttagtgggtggtggtgaagatggtgacactgat

SEQ ID NO: 7816 - DNA, 587 bp, Homo sapiens
aagatgggggtaggtgctgagccggctgggcgccgcttccgtgtgacattgtggggccggtgacattgggacaagaaagatgacaaggactcacccaagaagaacaagggcaaggagcgccgggacctggatgacctcaagaaggaggtggctatgacagagcacaagatgtcagtggaagaggtctgccggaaatacaacacagactgtgtgcagggtttgacccacagcaaagcccaggagatcctggcccgggatgggcctaacgcactcacgccaccgcctaccaccccagagtgggtcaagttttgccggcagctcttcgggggcttctccatcctgctgtggatcggggctatcctctgcttcctggcctacggtatccaggcgggcaccgaggacgacccctctggtgacaacctgtacctgggcatcgtgctggcggccgtggtgatcatcactggctgcttctcctactaccaggaggccaagagctccaagatcatggagtccttcaagaacatggtgccccagcaagccctggtgatccgggaaggtgagaagatgcaggtgaacgctgaggaggt

SEQ ID NO: 7817 - DNA, 300 bp, Homo sapiens
aggacttctcatcttatttatcagatggactacatttgtctccaaaggggaatgaatttttgttctcgcatctctggcctttgatagagaaaaaggtctcttctctacctttgctgcttccttactggcgggatgtagcagaagcaaaacctgaattaagtctgctgggagatggagaccattagccaatcacaggagacccaaatctgcttgttatctacagaactcaaagttgtcaatacgtagagtaaatgcagcccatccagaatcctggagcaataaagtaagaagtaattcaaa

SEQ ID NO: 7818 - DNA, 721 bp, Homo sapiens
aggtgggaaggctaaactgaggaattatgtctgacagaagggaatgacaaggctaaactgaagaattatgtctgacagaagggaagaaatgactgcagtggccttctcagaccctgtaggaaaggactctacttatccggtgaaagtgtctacctagactaagaggtgattcctacttcagccccttggtgtgagcagcttctcaacatgaactacagcctccacttggccttcgtgtgtctgagtctcttcactgagaggatgtgcatccaggggagtcagttcaacgtcgaggtcggcagaagtgacaagctttccctgcctggctttgagaacctcacagcaggatataacaaatttctcaggcccaattttggtggagaacccgtacagatagcgctgactctggacattgcaagtatctctagcatttcagagagtaacatggactacacagccaccatatacctccgacagcgctggatggaccagcggctggtgtttgaaggcaacaagagcttcactctggatgcccgcctcgtggagttcctctgggtgccagatacttacattgtggagtccaagaagtccttcctccatgaagtcactgtgggaaacaggctcatccgcctcttctccaatggcacggtcctgtatgccctcagaatcacgacaactgttgcatgtaacatggatctgtctaaataccccatggacacac

SEQ ID NO: 7819 - DNA, 643 bp, Homo sapiens
attgattgaaccttattctggggcttcggtttggcttactagtttgggattttaaaaaaataaaaattaagcctatagagagggcaaattaaaattaggttgggtaaaggaaggagcgcgagtgtttgaagccgtttggagggaacagcggtttccaagttcctgctgacttgagaagtctctgcgggtttccgaatctccggcgcactcctgggcgcgctgcgggagctgtagctcagccagccagggagtagcggctttcatccgccgggaggagtctttcgagttcaatcgcggggtatagaggttcccctgcggggcaaaatgcagagcttgacacaagcccttggcctctaggctctgaaactgcggagcggccaccggacgccttctggagcaggtagcagcatgcagccgcctccaagtctgtgcggacgcgccctggttgcgctggttcttgcctgcggcctgtcgcggatctggggagaggagagaggcttcccgcctgacagggccactccgcttttgcaaaccgcagagataatgacgccacccactaagaccttatggcccaagggttccaacgccagtctggcgcggtcgttggcacctgcggaggtgcctaaaggagacaggacggcag

SEQ ID NO: 7820 - DNA, 437 bp, Homo sapiens
gaactcgatcctgctggctgctgtctctattctctcggcctgtcagcaaagttattttgctttgcaagttggaaaggcaagattaaaatacaaagttacgcccccagcagtcactgggtcaccagagtttgagagagtatttcgggcacagtggacctggacatctcatcagcgtcacttcaaggttcactgatcctaaaggactgtttcttgttggaaggtcatctcaggacaaaactgtgtggagttttatcctatattcataattacattgtggatggctgggtggtatttcaaccaagtttttgctacttgtctgggtctggtgtacatatatggccgtcacctatacttctggggatattcagaagctgctaaaaaacggatcaccggtttccgactgagtctggggattttggccttgttgaccctcctag

SEQ ID NO: 7821 - DNA, 439 bp, Homo sapiens
ggcgccgccggggaacgggcgcgggccgcgccacagccggagcggggcagggccccgccaccgccttcttccgccggccccgccgccggccatgcattcttccggctcctctgactcccaaagccccggctggggcccggccagcccgaggcagccgcgaggggagtagggcgccagcgcgcccgctcgcgcagcgcctcgggccgcttgggccgccaccgcgtccatgaccgcgacccctcggcgggggacacccgcccccgctctccgcagccgcccgccgtccgcgcccgccgagacaggacggagtccagtgtgagaatggctataactttggaagaagctccgtggctgggctggctcttggtgaaagcactgatgaggtttgccttcatggtcgtcaacaacctggttgctattccatcctacatctgctatg

SEQ ID NO: 7822 - DNA, 476 bp, Homo sapiens
aactgcaaagtttgctgtccggctgcctagggtctgggaagctcgggcaccctccctctccggggctcctgctcccacccctccggcccccccaccgtcgcgctcctccaggctgggcctgtggccgcggtgctttttaattttcccccagctcagaatcttgctgctcggcccccaggagagcaacaactcaacgggaacgatgtggaaggtgtcagctctgctcttcgttttgggaagcgcgtcgctctgggtcctggcagaaggaggggaaggcgtttaacaactcgggggtgaagcctggtggacagcggcagggacatcataaatacagaagataattttaaagaagtgttccggccgggtgcagtggctcacaactgtaatcccaggactttgggaggctgaggcgggcagatcacctgagccagcacaggccagccagaagatgacactgagactacaggtttggaagg

SEQ ID NO: 7823 - DNA, 662 bp, Homo sapiens
agctgcggccgcgcccttgccagagccggtgcgtccgcctagccccgctccgcctgaggccgtcagggctcccgaggatggaagattcccaggagacatcgccgtcctccaacaactcctcggaggagctcagctctgctctgcacctgtccaagggcatgtcgatcttcctcgacatactgaggagagcagacaaaaatgatgatggaaaattatcctttgaagaattcaaagcatattttgcagatggtgttctcagtggagaagaattacacgagcttttccataccattgatacacataatactaataatcttgacacagaagagctatgtggtaagtgtttctttaagatcagtcaaacctattacttgcttaagaaggaaaaagagtattgtctgatatatatcaaccttggaattaatgttgtatattaggagttcacaaaggaaaaattaatcgagatctcaagggatttatctttacccgtgaattttgctcaagtatgtatttcactccagaaagagttgggcctcattagttcgttcatagaagaagaattgttgttacaatcagtacattagtttcgcaagagcaaattctccacaagtttgaatatatttttaaattgatgtttaatacaacttcattattctctgcat

SEQ ID NO: 7824 - DNA, 2705 bp, Homo sapiens
ggcccatttcctttcttcttttcgtgtagtctgttccttttcaaggcctagttcaagaaaaacttagttcccttggccttcacagtctacagtgtattttttaaatcttgaaaggttacctttgatatttcagatgaacttatatttgaatacacttcaaaataagcctgcgttgggggaatggtgttcaggtgagggcgaggttacagatgaaacagggttgtccacatgttgctgcttcttgaagctggatgatggctccgtggaggcccccttgtgctcttctgtttttgtatgtgcttgaaatttttcataataaaaagtttaattgaaaaaatgaacttacgtattatgctctaaaataaggacaaattgagctataatttatcttatactataaatactgttcttcagacttgttgggtttttttttattattttttctcttgtagagtggtggatatgttcttggctttaaaatagatcctgtggaaaaactacaagaatcagttaaggaaatcaattcacttcacaaagtctattctgccagtcccatatttggagttgattatgagatggaagaaaagccccagccgctcgaagctctgacagtcgaacaaattcaagatgatgtagaaatagactctgatggtcacacggatgcttttgtggcttattttgctgatggcaataagcaacaagatcgtgaacctgtattttcagaagaactggggcttgcaatagagaaattgaaggatggattcaccctacagggactttgggaagtaatgagttgattgaccttgagttgagatggatttctattaaagatatctctagtttaaagatactagtcacctgccataagtcatggaatagtttttatatttacagcttttatatttaaaacttgtaagagtttttttaatgattgaggaaaaagtcatttagaaaacttcagttttcggccagcgcgtcgagggaggggccagcgacacatggcctagtaaccgtccggccgcggcgctggcttaagccatggctgagggtagctggattcctcaggcccgggcgctcctacagcagtgcctgcacgcccggctgcaaattcgcccagccaatggggacgttgcggcccagtgggtggaggtccaaagaggactggtgatctacgtgtgctttttcaagggagctgataaagaacttcttcccaaaatggccgaagctggactgtactgctgccatctctggctcactgcaacctccctgcctgattctcctgcctcagcctgccgagtgcctgcgattacaggcgcgcgccgccacacctgactggttttcgtatttttttggtggagacggggtttcgctgtgttggccgggctggtctccagctcctaaccgcgagtgatccgccagcctcggcctcccgaggtgccgggattgcagacggagtctggttcacttagtgctcaatggtgcccaggctggagtgcagtggcgtgatctccgctcgctacaacctccacctcccagctgcctgccttggcctcccgaagtgccaagagtgcagcctctgcccggccgccaccccgtctgggaagtgaggagcgtctctgcctggctgcccattgtctgggacgtgagcagcccctctgcctggctgcccagtctggaaagtgaggagcgtctctgcccggccgccatcccatctaggaagtgaggagcgcctcttcccacccgccatcccatctaggaagtgaggagcttctctgcctggccgcccatcgtctgagatgtggggagcacctctgcccggccgcgaccccatttgggaggtgaggagcaactctgcccagccgccccgtctgagaagtgaggagaccctccgcctggcaaccgccccgtctgataagtaaggagcccctctgcccagcagccgccccgtctgagaagtgaggagcccctctgcccagcagccaccctgtctgggaagtgaggagcgtctccgcccggcagccacccagtccgggagggaggtgggggggtcagtcccccgtccggccagccgccccgtccgggaggtgaggggcgcctctgcccagctgcccctactgggaagtgaggagcccctctgccccgccagccaccccgtccgggagggaggtgggggggtcagccccccgcccggccagccgccccgtccgggagggaggtgggggatcagccccccgcccggctagccgccccgtccgggaggcgaggggcgcctctgcccggctgcccctactgggaagtgaggagcccctctgcccggccagccgccccgtccaggagggaggtgggggggtcagccccccgcccggccagccgcccggtccgggagggaggtgggggggtcagccccccgcccggccagccgccccgtccgggaggttaggggcgcctctgcccggccgcccctactgggaagtgaggagcccctctgcccggccaccaccccgtctgggaggtgtacccaacagctcattgagagcgggcgatgatgacagtggcggctttgtggagtggaggtggggggaaggtggggaaaagattgagaaatcggatggttgccgtgtctgtgtagaaagaagtagacatgggagacttttcattttgttctgtactaagaaaaattcttaccctaaaacttaaagtataat

SEQ ID NO: 7825 - DNA, 889 bp, Homo sapiens
agagaaacaaggctggcttcaagtgatctgcaaccagagtaattgggatttgacaaggactgtgaaaggctgactctccctgttctctttcatgctggcaccgggcagagtgtgggaactactgcctcaatacgatcatagaagccattgagatcccgcagtttatcggccgcagttacctgacgtatgacaacccagatatcttgaagaggtaataagcttcaacaggcaccttcctcagctttctggggggtgtcaggatcaagatcaaatgtgttcatgaggtttaaaacaactgccaaggatggccttttgctgtggaggggagacagccccatgagacccaacagcgacttcatttccttgggccttcgggatggagccctcgtgttcagctataacctgggcagtggtgtggcatccatcatggtgaatggctccttcaacgatggtcggtggcaccgagttaaggccgttagggatggccagtcaggaaagataaccgtggatgactatggagccagaacaggcaaatccccaggcatgatgcggcagcttaacatcaatggagctctgtatgtgggtggaatgaaggaaattgctctgcacactaacaggcaatatatgagagggctcgtgggctgtatctctcacttcaccctgtccaccgattaccacatttccctcgtggaagatgccgtggatgggaaaaacatcaacacttgtggagccaagtaacaccagctggccttgtccaagggacagagccttctattctgagaatcccaggggccctcagaccctgcctgatgctatatgcagaggcccagggaccaggtgtgtttcctctcaccaagaagaaagtacacactgatgagaaactgagaac

SEQ ID NO: 7826 - DNA, 1583 bp, Homo sapiens
cgcggcggtggcgggggcgcaaccagcgggccgaggcggcggcgccagcggcgccttaaatagcatccagagccggcgcggggcagggagtgggctgcagtgacagccggcggcggagcggccggtccacggaggagaattcagcttagagaactatcaacacaggacaatgcaagcccatgagctgttccggtattttcgaatgccagagctggttgacttccgacagtacgtgcgtactcttccgaccaacacgcttatgggcttcggagcttttgcagcactcaccaccttctggtacgccacgagacccaaacccctgaagccgccatgcgacctctccatgcagtcagtggaagtggcgggtagtggtggtgcacgaagatccgcactacttgacagcgacgagcccttggtgtatttctatgatgatgtcacaacattatacgaaggtttccagaggggaatacaggtgtcaaataatggcccttgtttaggctctcggaaaccagaccaaccctatgaatggctttcatataaacaggttgcagaattgtcggagtgcataggctcagcactgatccagaagggcttcaagactgccccagatcagttcattggcatctttgctcaaaatagacctgagtgggtgattattgaacaaggatgctttgcttattcgatggtgatcgttccactttatgatacccttggaaatgaagccatcacgtacatagtcaacaaagctgaactctctctggtttttgttgacaagccagagaaggccaaactcttattagagggtgtagaaaataagttaataccaggccttaaaatcatagttgtcatggatgcctacggcagtgaactggtggaacgaggccagaggtgtggggtggaagtcaccagcatgaaggcgatggaggacctgggaagagccaacagacggaagcccaagcctccagcacctgaagatcttgcagtaatttgtttcacaagtggaactacaggcaaccccaaaggagcaatggtcactcaccgaaacatagtgagcgattgttcagcttttgtgaaagcaacagagaatacagtcaatccttgcccagatgatactttgatatctttcttgcctctcgcccatatgtttgagagagttgtagagtgtgtaatgctgtgtcatggagctaaaatcggatttttccaaggagatatcaggctgctcatggatgacctcaaggtgcttcaacccactgtcttccccgtggttccaagactgctgaaccggatgtttgaccgagtaagttccaagcagcgaagtcccaggactgagcactgacttggacgcaggggcttgggcttgaattgggctgtgccatgtgccatctgtatgaccctggacaatcctcccaatcttacagaacttcagtttactcatctgtaaagttagaatgcgtttacctctcagagtggctgataaggattataagagaaaatgcatgaacacactttgtaaaccatggtcacaacacaagcataatgtgggaggtcattttatttttacaataaacactttgagcctctgc

SEQ ID NO: 7827 - DNA, 2732 bp, Homo sapiens
caactgccactccaaggagaacagaaatggttccgttattagtggctgctgtgggaccacgacagtctgtgggagagaagacacggttcaatgtgtagaccttctccctctccagtgtctccagcctccaatcccaggacatcactagtacaggtgaaaacaaaagcctgtctcagcggccatcactctgccagcagcacctcaaagccattcaaaacgcccaaagacaatctacttacctccagcagcaaacagcacacagtctttcctgcgaaaggatcaagggataaaccatgacatcactgggcagggaggggaatctacttgatgccaagagaaccatgtttcttaaagccagaggacccgccttgatctagaaagataaattcagacaggccaagcacaaaggaagaagacgtgggcaactaaagcagcacaaaagaaacagagtgttccagttcctgtagtcagtttagagaaaattcctaacctagtgaaggcagatggtgccaatgtcaaaatgaactccacaaccactactgcagtttctgcctcctccacctcgtcctctgccgtctccacccctcctttaattaagcctgtcctgatgtccaagtcagtgccaccttcaccagagaagatcttaaatggcaaaggaattctgccaaccaccatagacaagaaacaccaaaatggcaccaaaaacagcaacaagccttacaggagactttcagagagagaatttgacccaaataaacactgtggagtattggatcccgagacaaagaaaccttgcacaagatccctcacctgcaagacacattcgctaagccatcggagggcagtcccaggccggaaaaagcaatttgacctcctcctggcagaacacaaagcaaagtcccgggaaaaagaagttaaagataaagagcatctcctgacttccacgagggaaatacttccaagccaatccgggccggcacaggattctctgctagggtcttcagggagctctgggccagaaccaaaagttgcatcccctgcaaaatccagaccacccaactctgtacttcctagaccatcatctgcaaatagcataagcagcagcacatcttcaaatcatagcggccacactccagagcccccactcccaccggttggaggtgacctcgccagccgactgtccagtgatgaaggggagatggacggagccgacgaatccgagaagctagactgtcagttctccacgcaccaccccagacctctggcgttttgctcatttgggagtcgcctcatgggacgagggtactatgtgtttgatagaagatgggatcgttttcgattcgcactaaactccatggtagaaaaacacctgaattcacagatgtggaagaagatccctcctgcggcagatagccccctgccctcgccagcagcccacatcaccacccccgttccagcatccgttttgcagcctttcagcaaccccagtgctgtgtatcttccttcagctcccatcagctcgaggctcacctcttcttacataatgacatcagccatgctctcaaacgcagctttcgtgacatcgccggacccgagcgccctcatgtcccacaccacagctttccctcatgtggccgcaaccctcagcatcatggactcaaccttcaaggccccatccgccgtgtccccgataccagccgtcatcccttccccatcccacaagccatccaaaaccaaaaccagcaaatcctcaaaagtcaaagacctgtccacccgtagcgacgagtctccaagtaacaaaaaaaggaagccacagtcttcgacttcctcctcctcctcctcctcctcctcttccttgcagacatccctctcgtctccactgtcagggcctcacaaaaagaactgtgttttgaatgccagttctgctttgaactcctatcaggcggcccctccctataacagcctgtctgtgcacaactcaaacaatggggtgagcccactcagtgccaaactggagccctcaggacggacctcgctgcccggcggccccgcggacatagtgagacaggtgggcgcggtgggaggcagcagtgactcctgtcccctctctgtgccctcccttgcgctccacgcaggggacctctctctggcctcacacaatgctgtgtcttctctgcccctctcttttgacaaatcagaaggaaaaaagcgtaagaactcgagttctagtagcaaagcctgtaaaatcactaaaatgcctggtatgaatagcgttcacaaaaagaacccgcccagccttctcgcaccggtgcccgatcccgttaacagcacctcctctcggcaggtaagggacctcctggcaccgccttcaccggctctggggggcagggggagctgggcagcgcccctgcttagccgggcggctccgacaggtaacacaagcttgattcctgttctcgttttccccgaaggcagttttcaccctctgctttgagagcactttactgaacaagtacttgataccacgctcactatgtgctagacactgttctcggcactttacggttattacctcactgagtcctcacgacaccccagtgcagtgagtgcagttatcactttacagatgagtaaactgaggcacagagagattctgagttccccactccacatcggtcagttttatcttttgaggttctgagaacattgtcattaaagagttctgttgctaa

SEQ ID NO: 7828 - DNA, 653 bp, Homo sapiens
cgagatgtaccaagtgtccagactgcagcacatctgtgagctgttcatcattacccagctgcagagcatgccaagcagggaactggcatccatgaaccttgatatagttgacctgcttaaaaaggccaagtttcaccactctgattgcctttcaacctggctacttcatttcattgctactaactacctcatcttcagtcaaaagcctgaatttcaggatctttcagtggaagaacgcagttttgttgaaaagcacagatggccgtcgaatatgtacttgaagcagcttgcggaatacaggaagtatattcactcccggaaatgtcgttgcttagtaataaaaaggcactgatataaagggaagagaaggaggctcaccggagggaagagaacatagtgaagattcccgcctttggggaggtctggaccacccagggcctccactgccaccttggctggcaagggagaaatgtgttgtgttgtcttagctttaaaacagtcacagttcttgctctatcatagatgaacaaatactttcttgatcattctgtaagaccaggaggttggtaagagtgactaaccagcctaactttaatacacatgtataaagatgttcacagagaaagatgctctgtagagaatttgctaccgaa

SEQ ID NO: 7829 - DNA, 3769 bp, Homo sapiens
gtccagcctgctgttgaccaacactaacagatgagcaaggagctggcagcaatggggcctggagcttcaggggacggggtcaggactgagacagctccacacatagcactggactccagagttggtctgcacgcctacgacatcagcgtggtggtcatctactttgtcttcgtcattgctgtggggatctggtcgtccatccgtgcaagtcgagggaccattggcggctatttcctggccgggaggtccatgagctggtggccaattggagcatctctgatgtccagcaatgtgggcagtggcttgttcatcggcctggctgggacaggggctgccggaggccttgccgtaggtggcttcgagtggaacgtaaggaagctggcctggtttctccagaatactgagggtctaacccacctctgtctctggcattagtgctgggaggatccttagagatgcctgggaggctacatggtgaatcgagaatccatttcacaattgagaatccatttcacagatgaggaaatcaaggtctggaggagacagagggatccatccaaggtcacacgggaggactggggtcaggtcccaggtctcttatttctctgttcgggggcctcccacagcacagcactgcctctgggtgggaagccgcccctctgtctacatccaggacctggataccttcttcttctccccactctcccaggcaacctggctgctcctggcccttggctgggtcttcgtccctgtgtacatcgcagcaggtgtggtcacaatgccgcagtatctgaagaagcgatttgggggccagaggatccaggtgtacatgtctgtcctgtctctcatcctctacatcttcaccaagatctcgggatcctgctggtggtgactgccgtctacaccattgcaggtggcctcatggccgtgatctacacagatgctctgcagacggtgatcatggtagggggagccctggtcctcatgtttctgggtaaggaagagacctaaatataccccactgtcattcttaaattcctctctgtcctgtctctgccacctccacagttcgattgaaactttccagtgcatagagccatgtgagccatgtcccctctccaggctgcagctcccaaagagcagggttctcgctacttcaaaccaagggtcttgagcccaagccccatcttcctccttcacccccaatccccatgccagttccaacctgagggcccacatgaggctggggctgggcttgctgagtgacaggctcagtggggtttcagggctgcttcactcactgtctcctcacaggctttcaggacgtgggctggtacccaggcctggagcagcggtacaggcaggccatccctaatgtcacagtccccaacaccacctgtcacctcccacggcccgatgctttccacattcttcgggaccctgtgagcggggacatcccttggccaggtctcattttcgggctcacagtgctggccacctggtgttggtgcacagaccaggtcattgtgcagcggtctctctcggccaagagtctgtctcatgccaagggaggctccgtgctggggggctacctgaagatcctccccatgttcttcatcgtcatgcctggcatgatcagccgggccctgttcccagacgaggtgggctgcgtggaccctgatgtctgccaaagaatctgtggggcccgagtgggatgttccaacattgcctaccctaagttggtcatggccctcatgcctgttggtctgcgggggctgatgattgccgtgatcatggccgctctcatgagctcactcacctccatcttcaacagcagcagcaccctgttcaccattgatgtgtggcagcgcttccgcaggaagtcaacagagcaggagctgatggtggtgggcagagtgtttgtggtgttcctggttgtcatcagcatcctctggatccccatcatccaaagctccaacagtgggcagctcttcgactacatccaggctgtcaccagttacctggccccacccatcaccgctctcttcctgctggccatcttctgcaagagggtcacagagcccggagctttctggggcctcgtgtttggcctgggagtggggcttctgcgtatgatcctggagttctcatacccagcgccagcctgtggggaggtggaccggaggccagcagtgctgaaggacttccactacctgtactttgcaatcctcctctgcgggctcactgccatcgtcattgtcattgtcagcctctgtacaactcccatccctgaggaacagctcacacgcctcacatggtggactcggaactgccccctctctgagctggagaaggaggcccacgagagcacaccggagatatccgagaggccagccggggagtgccctgcaggaggtggagcggcagagaactcgagcctgggccaggagcagcctgaagccccaagcaggtcctggggaaagttgctctggagctggttctgtgggctctctggaacaccggagcaggccctgagcccagcagagaaggctgcgctagaacagaagctgacaagcattgaggaggagccactctggagacatgtctgcaacatcaatgctgtccttttgctggccatcaacatcttcctctggggctattttgcgtgattccacagacctggcttcagtgtagacagattaaacaaagcccaagcctgtcagccacagaaacaggctctcctcttactttgctgtctaaactggagatcacagaagtcaagactgcaagctcccctgaagagaatccaactcaacctgcacacttgacaagtggagaaacagaagcccagagagagcactgggtttgttcaggaccacccagaaggtgtcacacggggtttccccactctttctgatatattgccttacagacctacctcaaacacactgtttccaccctcttcttgaatgtattcagtagcctttactgaatgtgtgtcttgagagtagaaaaatggaggatacaagaaaaggagcaggaagaaatttgcaaaaatccaagagcacctttgctcccccttatcctccttcctcttcccctttctagttcccctacctctctatctttctattctcaccaataatctctttgttgcatgaatttacccaggagagtcctatatttccattggtggctccacagtggtggctgtcagacccgaaggggtggggagccaagggtggactttaagcatggtgacagatggtattttgggcagaaagctcttagacaatggactatccaaagcactatttaaattctgcctcttcctactctctaacccaaatatgcacaaactctctatggccttgagaagcagttggagagacatgacttgttaaaacctcaaggaatcaagacatgttactctgtatttaagggtaagccccacagcgggcagcacaaacagcctgggagccactgtgcctgtgcttctctgtccttctccctttgcttgccatgaatccgcataccttggaatacactgtgaccccagttaagtgtcccttcgccaggaagctgccgcaacgtccagacctgggtcaagttcccactcctgctcccatagccttgacctgcttctgtcacagcactgatcacactgagatggaagactccagggggcaaggaccaagggccatatcccaagtgactttgtacccagaaaataacagctgttcaataaatgtgtattgagttaattagt

SEQ ID NO: 7830 - DNA, 1633 bp, Homo sapiens
cgtagagggaatgagtcaggctccggctccacactggcacgtagtgggcggatcgcgccggcgctgagtaggaaggagcttcagccgccagcccggaacgcatcataggttagcttttcaagacacttcctgcatctctgacctgttgcacctctgttatcttggcacctctgttatcttagcagcaagcacctgcctcagctgacccttgagccataacccataagctcctgaaaagtacatcaagtctaaagtgaaccagctaactcattaagactggaatcatgagcaacaatggagcagacctaacctttggttacatctcctgttttgtagctatccttttgtttggctcaaattttgtgccacttaaaaaatttgatactggtgatggtaattatttttccttgattgttaacgttatattatttttaaaaatgaagttccttttttggtcttttaaaagtatagctacaaaaataaatcatgttgatcttgatacctagtgaatagagcttaaaattagtcatttgacagtgctcataccagtttgtctgaaagtcagaataggagaaccattaaggttgtttcatggtaaagttagggagggtacagtcaggaaatctcttgggccattatatgaatggaagaaatttatagtcagttctactataacacctgttttgaaaacatgaatcttcaacatgattgatatattagagaacaatgtaagcataacagatttttggcttgcttatgtgcaattttgtccctgagaaacctctagataggcacagaagactgcacctagatgaataaagatgtgtgataatacacataatgcacgcagacacacgtacaatcttcaaatatcgaccagctcccttagttcatcacatgtggttatgatgtattccacccaaccacatctcctgtcccaactcctcacccaataccttcacagtaactcgtaagctgcaaccctttggatgctcacttccaggagcaaacttctggtgtttttcaattaaaatgccctatttattacagcatcatgtaattaaccagttaaccagttaaaactgtactactattttaattaggttgagtgttgttctcctagccccattttcccattatgctctgtagtttttactgcatgattttgcatagtgcagtgatttcaaggaatgcacatgttacattatagcagaactgactaatgtgaattttggggaaggagaagcaagagttatttgtatttgcctgacttccatattaaagccaggagaaggaattgagatttatggtgaacacatgttgggaattacttccttggtagtatttatcacctgacagcagttgtgttatttccccaattctttgtcttcgtgcacttagaaaataggattacctcctattttcctccagggcctttcttctcttttcctctggagttaggacaagaatgggaactacccgaagaacaaaaaaatgggtagaggatctagcttttttagtcttccacaattagctttgtgatcctgggcaaatattaccagctctgctgttttcagtttctcatttgtaaagtgaacaacttataaaatgaagtttcttttcatctctgtga

SEQ ID NO: 7831 - DNA, 557 bp, Homo sapiens
agcagcaggaggaggcagagcacagcatcgtcgggaccagactcgtctcaggccagttgcagccttctcagccaaacgccgaccaaggaaaactcactaccatgagaattgcagtgatttgcttttgcctcctaggcatcacctgtgccataccagttaaacaggctgattctggaagttctgaggaaaagcagcactaaagatgtacctacccctccacaacagatgaaactgtgccagccaaacaacaaatgggcattgtccccagaagcttggacaaaaaggcacacagagttcaattccagttgaacagaataaaggccaaaatagagctgccttgggggtcactgcaattagactgcttaatgaagacattaaaagaagtattctgtgttcgtttgtgtgtggaggggtgtgtgtgtctgtttttcaactgatttgaaaatacaggtgttgaatcctaataataaaccagaaaaattaacatctccagagaagatagaggtcatactatttgaggcaagaattagcgtctttttaataaacgaaaatatggc

SEQ ID NO: 7832 - DNA, 1981 bp, Homo sapiens
gagccgctgctggtcccggccttgcggcctgcgggggaggctgcccggaggaggcagcggcggcggcagcgcgtcctcggtccccaggaccacggcttctttcctgccaggtcacaggctgtgcgtgtgcatgccgaacacccacatgcacacagttggtggctcagtctgatgtacctgacttctcacgccttcccccagtcctccagtaccgtgcctctacatgggctgggcagccccaaactgaaatgtgagtgccagagtgcatcctttaagcgaggtctgccccacggacacccgctccctctgtgtccctgctttgacagatctatccatctggccatccatccgtgggggtctgcaatggccacctttagccgccaggaatttttccagcagctactgcaaggctgtctcctgcctactgcccagcagggccttgaccagatctggctgctccttgccatctgcctcgcctgccgcctcctctggaggctcgctgcacatggtttgggtcgtgctgctcagcctcctgtgctacctcgtgctgttcctctgccgacattcctcccatcgaggcgtcttcctatccgtcaccatcctcatctacctactcatgggtgagatgcacatggtagacaccgtgacatggcacaagatgcgaggggcacagatgattgtggccatgaaggcagtgtctctgggcttcgacctggaccggggcgaggtgggtacggtgccctcgccagtggagttcatgggctacctctacttcgtgggcaccatcgtcttcgggccctggatatccttccacagctacctacaagctgtccaaggccgcccactgagctgccggtggctgcagaaggtggcccggagcctggcactggccctgctgtgccttgtgctgtccacttgcgtgggcccctacctcttcccgtacttcatccccctcaacggtgaccgcctccttcgcaagtgagcgtggctgcgagcctacgagagtgctgtctccttccacttcagcaactattttgtgggctttctttccgaggccacggccacgttggcgggggctggctttaccgaggagaaggatcacctggaatgggacctgacggtgtccaagccactgaatgtggagctgcctcggtcaatggtggaagttgtcacaagctggaacctgcccatgtcttattggctaaataactatgttttcaagaatgctctccgcctggggaccttctcggctgtgctggtcacctatgcagccagcgccctcctacatggcttcagtttccacctggctgcggtcctgctgtccctggcttttatcacttacgtggagcatgtcctccggaagcgcctggctcggatcctcagtgcctgtgtcttgtcaaagcggtgcccgccagactgttcgcaccagcatcgcttgggcctgggggtgcgagccttaaacttgctctttggagctctggccatcttccacctggcctacctgggctccctgtttgatgtcgatgtggatgacaccacagaggagcagggctacggcatggcatacactgtccacaagtggtcagagctcagctgggccagtcactgggtcacttttggatgctggatcttctaccgtctcataggctgaggcacatctgtggaccctcataaccctcttaagacccctctcagggtgccactgatgggggatgagggaaggccctctctctactccttgaccccctccatccttgacccccaacacctcaacacacacacacacacacacacacaaaatcacaccattttcatgcctgtcaatccccaccccaccacaaggcaggaagggggtggtgcctgctggggcctagagggggatgcttggggaaacagagaaggggagatccagggcctccccgccttccttcttcctttttatatacaatttgttattgtcaaataaaagtaggaaatattc

SEQ ID NO: 7833 - DNA, 1853 bp, Homo sapiens
gtggagctgccagagtaaagcaaagagaaaggaagcaggcccgttggaagtggttgtttaagttcttatcaagatatcatatataggacaaccccagcaatgtggagaagcctggggcttgccctggctctctgtctcctcccatcgggaggaacagagagccaggaccaaagctccttatgtaagcaacccccagcctggagcataagagatcaagatccaatgctaaactccaatggttcagtgactgtggttgctcttcttcaagccagctgatacctgtgcatactgcaggcatctaaattagaagacctgcgagtaaaactgaagaaagaaggatattctaatatttcttatattgttgttaatcatcaaggaatctcttctcgattaaaatacacacatcttaagaataaggtttcagagcatattcctgtttatcaacaagaagaaaaccaaacagatgtctggactcttttaaatggaagcaaagatgacttcctcatatatgatagatgtggccgtcttgtatatcatcttggtttgcctttttccttcctaactttcccatatgtagaagaagccattaagattgcttactgtgaaaagaaatgtggaaactgctctctcacgactctcaaagatgaagacttttgtaaacgtgtatctttggctactgtggataaaacagttgaaactccatcgcctcattaccatcatgagcatcatcacaatcatggacatcagcaccttggcagcagtgagctttcagagaatcagcaaccaggagcaccaaatgctcctactcatcctgctcctccaggccttcatcaccaccataagcacaagggtcagcataggcagggtcacccagagaaccgagatatgccagcaagtgaagatttacaagatttacaaaagaagctctgtcgaaagagatgtataaatcaattactctgtaaattgcccacagattcagagttggctcctaggagctgatgctgccattgtcgacatctgatatttgaaaaaacagggtctgcaatcacctgacagtgtaaagaaaacctcccatctttatgtagctgacagggacttcgggcagaggagaacataactgaatcttgtcagtgacgtttgcctccagctgcctgacaaataagtcagcagcttatacccacagaagccagtgccagttgacgctgaaagaatcaggcaaaaaagtgagaatgaccttcaaactaaatatttaaaataggacatactccccaatttagtctagacacaatttcatttccagcatttttataaactaccaaattagtgaaccaaaaatagaaattagatttgtgcaaacatggagaaatctactgaattggcttccagattttaaattttatgtcatagaaatattgactcaaaccatattttttatgatggagcaactgaaaggtgattgcagcttttggttaatatgtctttttttttctttttccagtgttctatttgctttaatgagaatagaaacgtaaactatgacctaggggtttctgttggataattagcagtttagaatggaggaagaacaacaaagacatgctttccatttttttctttacttatctctcaaaacaatattactttgtcttttcaatcttctacttttaactaataaaataagtggattttgtattttaagatccagaaatacttaacacgtgaatattttgctaaaaaagcatatataactattttaaatatccatttatcttttgtatatctaagactcatcctgatttttactatcacacatgaataaagcctttgtatctttctttctctaatgttgtatc

SEQ ID NO: 7834 - DNA, 696 bp, Homo sapiens
gcacagatatgcaaagcagaaaccctcgtgcaggcccgaaagagaaagcgaaccagtatcgagaaccgagtgagaggcaacctggagaatttgttcctgcagtgcccgaaacccacactgcagcagatcagccacatcgcccagcagcttgggctcgagaaggatgtggtccgagtgtggttctgtaaccggcgccagaagggcaagcgatcaagcagcgactatgcacaacgagaggattttgaggctgctgggtctcctttctcagggggaccagtgtcctttcctctggccccagggccccattttggtaccccaggctatgggagccctcacttcactgcactgtactcctcggtccctttccctgagggggaagcctttccccctgtctctgtcaccactctgggctctcccatgcattcaaactgaggtgcctgcccttctaggaatgggggacagggggaggggaggagctagggaaagaaaacctggagtttgtgccagggtttttgggattaagttcttcattcactaaggaaggaattgggaacacaaagggtgggggcaggggagtttggggcaactggttggagggaaggtgaagttcaatgatgctcttgattttaatcccacatcatgtatcacttttttcttaaataaagaagcctgggacacagtagatagacacactta

SEQ ID NO: 7835 - DNA, 563 bp, Homo sapiens
agaagagcgggaagaggcggacagcgaggccaagatttcagctgcgggacgggccagggtgacacggaagcatgcgacggctgctgatccctctggccctgtggctgggtgcggtgggcgtgggcgtcgccgagctcacggaagcccagcgccggggcctgcaggtggccctggaggaatttcacaagcacccgcccgtgcagtgggccttccaggagaccagtgtggagagcgccgtggacacgcccttcccagctggaatatttgtgaggctggaatttaagctgcagcagacaagctgccggaagagggactggaagaaacccgagtgcaaagtcaggcccaatgggaggaaacggaaatgcctggcctgcatcaaactgggctctgaggacaaagttctgggccggttggtccactgccccatagagacccaagttctgcgggaggctgaggagcaccaggagacccagtgcctcagggtgcagcgggctggtgaggacccccacagcttctacttccctggacagttcgccttctccaaggccctgccccgcagctaa

SEQ ID NO: 7836 - DNA, 577 bp, Homo sapiens
gtggatggcactttcgtcctcagctgtgtggccacaggcagtccagtgcccaccattctgtggagaaaggatggagtcctcgtttcaacccaagactctcgaatcaaacagttggagaatggagtactgcagatccgatatgctaagctgggtgatactggtcggtacacctgcattgcatcaacccccagtggtgaagcaacatggagtgcttacattgaagttcaaggtaaagtaaatgaatttggagttccagttcagcctccaagacctactgacccaaatttaatccctagtgccccatcaaaacctgaagtgacagatgtcagcagaaatacagtcacattatcgtggcaaccaaatttgaattcaggagcaactccaacatcttatattatagaagccttcagccatgcatctggtagcagctggcagaccgtagcagagaatgtgaaaacagaaacatctgccattaaaggactcaaacctaatgcaatttaccttttccttgtgagggcagctaatgcatatggaattagtgatccaagccaaatatcagatccagtgaaaacacaag

SEQ ID NO: 7837 - DNA, 1498 bp, Homo sapiens
agcgtgttcagcctgcctgcctgcctgcctctgtgtgtgtgtgagcgtgtgtgcgtgcgtctactttgtactgggaagaacacagcccatgtgctctgcatggacgttactgatactctgtttagcttgattttcgaaaagcaggcaagatgtccagcacaccacatgaccccttctattcttctcctttcggcccattttataggaggcatacaccatacatggtacagccagagtaccgaatctatgagatgaacaagagactgcagtctcgcacagaggatagtgacaacctctggtgggacgcctttgccactgaattttttgaagatgacgccacattaaccctttcattttgtttggaagatggaccaaagcgatacattgtgcattcagcggcagatgccagaggaaactgcaaccagctcggggattcggaaccagatgcctgtgatggattattacaatttcctatcatgtaattgcttttctgtttgaccaaagctatcggcaggaccctcatcccccgttactttagcactgtgtttgaaggaggggtgaccgacctgtattacattctcaaacactcgaaagagtcataccacaactcatccatcacggtggactgcgaccagtgtaccatggtcacccagcacgggaagcccatgtttaccaaggtatgtacagaaggcagactgatcttggagttcacctttgatgatctcatgagaatcaaaacatggcactttaccattagacaataccgagagttagtcccgagaagcatcctagccatgcatgcacaagatcctcaggtcctggatcagctgtccaaaaacatcaccaggatggggctaacaaacttcaccctcaactacctcaggttgtgtgtaatattggagccaatgcaggaactgatgtcgagacataaaacttacaacctcagtccccgagactgcctgaagacctgcttgtttcagaagtggcagaggatggtggctccgccagcagaacccacaaggcaaccaacaaccaaacggagaaaaaggaaaaattccaccagcagcacttccaacagcagcgctgggaacaatgcaaacagcactggcagcaagaagaagaccacagctgcaaacctgagtctgtccagtcaggtacctattgctagcattgctcgttctccagtgtcaggctgcgcactaaggacataaactcgcgtggttgttacacatcaggaggcgatgtttatttcctgtagaaatcaaatatgcgtctcggcccccgacattgagacttgaccccgttgtacagtacacgagtgtgtctgtcctagattccccgactcctcccactgttattttaagctgagcttctctctcccaaggtttccctgtaataatgtcagctgctgttcacaggatgtgatggtggtaggagagccaactctgatgggaggtgagtttggggacgaggacgaaaggctaatcactagattaga

SEQ ID NO: 7838 - DNA, 558 bp, Homo sapiens
gagtttcaccgcggacctgtcagagatacagaggttgtgggggcgggagacagaaagagagagagatccagagaccgagtcttacgttgacacgcagagagaaagacgcagagacagacaaacaaacagataggagagtgtttaactgctgaagagatcttttcccttcatggcttttcaaatgctacccaaataaccagctccaaattctctgtcatctgtccagcagtcttacagcaattgaactttcacccatgtgaggatcggcccaagcacaaaacaagaccaagtcattcagaagtttggggatatggattcctgtcagtgacgattattaatctggcatctctcctcggattgattttgactccactgataaagaaatcttatttcccaaagattttgaccttttttgtggggctggctattgggactcttttttcaaatgcaattttccaacttattccagaggcatttggatttgatcccaaagtcgacagttatgttgagaaggcagttgctgtgtttggtggattttacctacttttcttttttgaa

SEQ ID NO: 7839 - DNA, 668 bp, Homo sapiens
cagtaagttctacagaaattatatgctgaattgaaattgtatttttatccaaaatataagaatctattcaagaaaaggttcacagtggaacaggaaattgatttaaaagatgttttgaaggctcttggaataactgaaattttcatcaaagatgcaaatttgacaggcctctctgataataaggagatttttctttccaaagcaattcacaagtccttcctagaggttaatgaagaaggctcagaagctgctgctgtctcaggaatgattgcaattagtaggatggctgtgctgtatcctcaagttattgtcgaccatccatttttctttcttatcagaaacaggagaactggtacaattctattcatgggacgagtcatgcatcctgaaacaatgaacacaagtggacatgatttcgaagaactttaagttactttatttgaataacaaggaaaacagtaactaagcacattatgtttgcaactggtatatatttaggatttgtgttttacagtatatcttaagataatatttaaaatagttccagataaaaacaatatatgtaaattataagtaacttgtcaaggaatgttatcagtattaagctaatggtcctgttatgtcattgtgtttgtgtgctgttgtttaaaataaaagtacctattgaa

SEQ ID NO: 7840 - DNA, 457 bp, Homo sapiens
attttacaggatttcaaattattggtggggagaagatgggaagactggacctaggcatatttatcagttcagttgcccctggaggaccagctgacttggatggatgcttgaagccaggagaccgtttgatatctgtgaatagtgtgagtctggagggagtcagccaccatgctgcaattgaaattttgcaaaatgcacctgaagatgtgacacttgttatctctcagccaaaagaaaagatatccaaagtgccttctactcctgtgcatctcaccaatgagatgaaaaactacatgaagaaatcttcctacatgcaagacagtgctatagattcttcttccaaggatcaccactggtcacgtggtaccctgaggcacatctcggagaactcctttgggccatctgggggcctgcgggaaggaagcctgagttctcaagattccaggactgagagtgc

SEQ ID NO: 7841 - DNA, 584 bp, Homo sapiens
gagaaaaaagtgggcttcgggatgctggggaatctgggctctggctaagtttgcctccgtgagagatgcagctgtagacgttgtagggaggtaagacctcttaagaatcaggaaaagatttagcagtgtcctctgtcaaaacacggccccactccaaataaagcatcttctcttttagagcagaaactttgcaaattgaggaaaggaaactgcagcagcactgtgtgtgggcaagacctccagtcacacttgtgcatgtgtgcagagggatacgccctaagtcgagaccggaagtactgtgaagatgttaatgaatgtgctttttggaatcatggctgtactcttgggtgtaaaaacacccctggatcctattactgcacgtgccctgtaggatttgttctgcttcctgatgggaaacgatgtcatcaacttgtttcctgtccacgcaatgtgtctgaatgcagccatgactgtgttctgacatcagaaggtcccttatgtttctgtcctgaaggctcagtgcttgagagagatgggaaaacatgtagcggttgttcctcacccgataatggtggatgtagcca

SEQ ID NO: 7842 - DNA, 569 bp, Homo sapiens
agaagtcgataagaccaggagaagtgaagatgtaacatgttatctgtcgctcctcttagctggcggagagaatttacatttaaagattagcagagtgagaaagagaaatctgccttttgttgtgtggggtgaggaggaggcatctacccctggccttgacgctatctcccatcacctctgctatccagacaggactcaccgagaaaagattgatctctgggctggtgaacataatctctgtcccagtcagaaaaggagagaggaaattagcagagcgattggtggagaatgatatctgtcaaaagaaacacttggagagcactgagtttagtaataggtgactgccggaaaaaagggaactttgaatattgtcaaggaggcatgagcccggaacgcgcttgcttttaggagacagccactttctgtgtggtacgctggattcaaggatgcctgatcgtactgagaagcactccacaatgccagactcacctgtggatgtgaagacgcaatctaggctgactcctccaacaatgccacctcccccaactactcaaggagctccaagaacc

SEQ ID NO: 7843 - DNA, 358 bp, Homo sapiens
cttgcttccacttcaccttcccgacccacagctgcctctgcccctccagcccctgtggccaggatggagggagggcggcctgggccttctgggggacacccagggtccctgtgtgcacctcatgccccacccccaccagggaaggtgagtgtcccagaggaggagctggacgccatgctgcaagagggcaagggccccatcaacttcaccgtcttcctcacgctctttggggagaagctcaatgggacagaccccgaggaagccatcctgagtgccttccgcatgtttgaccccagcggcaaaggggtggtgaacaaggatgagttcaagcagcttctcctgacccaggcagacaagt

SEQ ID NO: 7844 - DNA, 550 bp, Homo sapiens
atcgatcctcgggtgagtgcgggcgcaggtggagggcgcccggcgctctcgccaccggcgtcccagcctcggggcggcgaacggtccccgcgccgctcccagcctccctggccgggcgttcagcgcgcctgggaggggaaggaatttcctttgcaggaactcaggggctgggggttctctgctacttaagagatccaggagtggagcccggacgcccgagccttcctgcttcgggatggggattaccgcggagccttagcaactggggtggcctcgaggtggtggcagggccgccccctgcagtccggagacgaacgcacggaccgggcctccggaggcaggttcggctggaaggaaccgctctcgcttcgtcctacacttgcgcaaatgtctccggcttgctccacttatcgggctcaccaaatacagctgcagtatgaattccatcttctacacaacagtaaaccagaatgttcatgttcacagcgttcatctcccatcctgttgtctaacgcacatggtttttttaaacttttctaagattgcatga

SEQ ID NO: 7845 - DNA, 3835 bp, Homo sapiens
taagaaaaaataaacttttaaattaaaattgttatgccaaatttgggtgtctcaaactatttgtttgcgtatgcagtagccaacttagactgtgtctatgtttgtacgtatttatacataaagggctgtagaagttacttatgtttttcttttaatggctacgagtccacatatttaatcaaatgatgaatcaaggtaagatcaattttttttaaatgcagataaatgaatagtatgactttcatagcagtgacttaaatttaaatgtacactctgaaggttgtgtgtggtaaaagtgtgtttatttagactgtgggggaaacaggtgctcttactctccagttagtcactgagctagataatactgtaatcccaagaaacgggcattgtaggccttttgtttagccctgttaatgcttcattctactaataaaactctagtaatagtaaaaaaaatcgtgtattcaatgaatattaattgaatatgccaggaactgtgttaagagtaggtgataaaaaggtgaagacatgatccattctcatcaggaaataatcttatctactacgaaccctcatgcctgtgctgcagaagctgaggtcccagagggatggattctgactagattaggggtctagggatagacagaaaagaggcctctgaaaaaccaaactgatgttattactaatgattccataatttattcattggagaatcctctgggtccacattcagaacatattttctttaatatttttcatgattgtacctagtgcttctgtctggtattttgtttgatagttgcttcgaacaaatatggtgtggagacacacactgacaacagcaaaaagtgctgactgggaccgacagtgagggaggggagcccagagggaagttgataacccaaatgtcatctggtatctccagttgttcattccttgatattgctgatgataatgttacaaactgtaccagggaaagcaaacatagtcactgcccctggtaagaaggcaggggaataactatcttagaaaatttgatgaaaatcaagtttgtaaaatattaatacctgaaaagtcatatacttacatctccaacattcatttaaaactgagttgtgggatatgtaagttgcatttgtgtgcatgtgtatgtatgtatgtatgtatgcagaaacattttgatttgtggatgttttatgccttaaaatatttactggcttgaaaatatattttaactggcttaaaattttagaggtgagctccctgtgaatatccgtgttaaattgaccattttgaaatttaagacaatatatatatcgtttcagatattgttccactattttgatcagaaaagtatgctagagaaccatattttacataaaagaatatatatattaacatttttcagtcagcagatatttattttatgtcatgcccatttcattttctttttcactgttagggacttttgccgtcaggatgaaaagtgtgattattactttagtgtggatgcagatgttgttttgacaaatccaaggactttaaaaattttgattgaacaaaacagaaagatcattgctcctcttgtaactcgtcatggaaagctgtggtccaatttctggggagcattgagtcctgatggatactatgcacgatctgaagattatgtggatattgttcaagggaatagagtaggagtatggaatgtcccatatatggctaatgtgtacttaattaaaggaaagacactccgatcagagatgaatgaaaggaactattttgttcgtgataaactggatcctgatatggctctttgccgaaatgctagagaaatgactttacaaagggaaaaagactcccctactccggaaacattccaaatgctcagccccccaaaggtgttatttttacttattttatttatttttgtttatttaatatttgatatagtatattgcctagtagtaaagtttctttaagggccttatttgcatttagcttggtaaaatgttgattttcatcagtcatctgtgtgtttgcgtgttttgtgtgacttgggcatgggtcttgtgtgatagtcaactcttggttctttgagctgatttatattttatggctgacaggtgacaaagttaaacctaagtccctttcattctttttttaggtttttatttctttttaaagggagagaagagggtagaagtaggtataaaatagaatttgattacagtaaggtttaggtgcaccttattgagttattaatcactaactcttttactattaaaacaggtccaaaaagaaacacattacctagtggtgtttgccacatttgtctggtttggggcaagaatatgagactggttttctttatctgcctttataatgtatgactcatttgcgtgttagcctttaaacattagaaaaagaaaggaatgaaacagactggtgaaatataactggcagtgaattcttgattaaaaatgtgatgctttctttgaaagagaaagaagccaaaagaggtataattcattgcactgtgtctcaaaaatatttctgctttcaaacaggaattttttccccgatgtctacatctaggatcaatgagaaagggacaaaaacagtccattcttctttttttcagttgagtgtcagtgctatctactagttttgtgtggtgtctgaattcataatcaaaatttgagttttttattttaaactatgcacattttatatgaatactaaaaatgcatgttcataaatgaaatataaagatagaaattaatatcttctatatatttttcctatgattaaatttacttttgtacctacctctaagattaatactgttattttctggcatatagggtgtatttatgtacatttctaatagacatgaatttggaaggctattatccactgctaattacaatacttcccattataacaatgacctctggcagatttttgaaaatcctgtggtatgtatttcatactcaactttattatttttctataactgtaagtggttataaatcagttggttaataatatgaaatgtggttagaggctttttaaaatgacataaggtgaaatgcacatcaaaaccacaatgagatactgtctcacaccagtcagaatggctattattaaaaagtcaaaaacaacagatatgggtgaggctacggagaaaagggaatgcttgtacgttgttggtcggaatgaatttggaaagcagtttgaagatttctcaaagatcttaaaacagagctaccatttgacccagcaattccattactgggtatatagccaaaagaaagtaagtcatttgaccaaaaacacacatgaacctgtatctgttcgttgcagcactattcacagtagcaaagacatggacttaaactaggtgttcattaatggtggattggataaagaaaatgtgttacatacacaccatagaatactatacagccataaaaaagaacaatattatgtcattttcagcaacatggagagaactggaggccattaccctaagtgaattaatggcacagaaaaccaaatactgcatgttctcacttatgagtgggagctaaacattgggtacttgtgaacataaatataggaacagtagaccctggggatcactagaggagtgagggagtagggagggggacaagggttgaaaaaccaactaatgggtactgtgctcactaccttggtgatgggatcagtcataccctaaaccttagcatcatgcattatacacttgtaacaaacctgcacatatactccctgaatccaaaagctgaaattgtttttaaaaagtaaataaaaa

SEQ ID NO: 7846 - DNA, 1046 bp, Homo sapiens
agaacgctcagggggcaggtgacacagtcgtgggttccccggcgggcgctggcttgacagtttcctccccgcccactggcaggggagcgccccgccgggctgcacgcgcgcgcgcgcaggggggcataaaagccgcggccgcgcggagacgcggagctcgcccaccgcccgccccagcagtggctgcaccatgcacgtgaacggcaaagtggcgctggtgaccggcgcggctcagggcataggcagagcctttgcagaggcgctgctgcttaagggcgccaaggtagcgctggtggattggaatcttgaagcaggtgtacagtgtaaagctgccctggatgagcagtttgaacctcagaagactctgttcatccagtgcgatgtggctgaccagcaacaactgagaggtttctgttatcagtggaacctatcttggtttggattacatgagtaagcaaaatggaggtgaaggcggcatcattatcaatatgtcatctttagcaggactcatgcccgttgcacagcagccggtttattgtgcttcaaagcatggcatagttggattcacacgctcagcagcgttggctgctaatcttatgaacagtggtgtgagactgaatgccatttgtccaggctttgttaacacagccatccttgaatcaattgaaaaagaagaaaacatgggacaatatatagaatataaggatcatatcaaggatatgattaaatactatggaattttggacccaccattgattgccaatggattgataacactcattgaagatgatgctttaaatggtgctattatgaagatcacaacttctaagggaattcattttcaagactatgatacaactccatttcaagcaaaaacccaatgaacagcttatgtgttagccatagctgaaaataagcacaaatagcttatattcagatcctatcttcatttgaatatagcttttaaatgaaatgttacagtttgaagttttccttcatgcacttggtgataaacgttttctaaatttttagttaagtatatggat

SEQ ID NO: 7847 - DNA, 574 bp, Homo sapiens
agtctacatgaaaaggatggtttcttggagcttccacaaacttaaaaccatgaaacatctattattgctactattgtgtgtttttctagttaagtcccaaggtgtcaacgacaatgaggagggtttcttcagtgcccgtggtcatcgaccccttgacaagaagagagaagaggctcccagcctgaggcctgccccaccgcccatcagtggaggtggctatcgggctcgtccagccaaagcagctgccactcaaaagaaagtagaaagaaaagcccctgatgctggaggctgtcttcacgctgacccagacctgggggtgttgtgtcctacaggatgtcagttgcaagaggctttgctacaacaggaaaggccaatcagaaatagtgttgatgagttaaataacaatgtggaagctgtttcccagacctcctcttcttcctttcagtacatgtatttgctgaaagacctgtggcaaaagaggcagaagcaagtaaaaggtagatatccttgtgctttccattcgattttcagctataaaattggaaccgttagactgccacgagaatgcatggtt

SEQ ID NO: 7848 - DNA, 510 bp, Homo sapiens
attgagggggtcacctttgggaagcagccgacacaatttcttaatttggaaagagcaacagaacttgctggaacgactgtgggtcttgcatttatgtctacaatgtgttctccttattctgttggcgttgttcaggaccacagcgataatcttcttagagttgcagggacaatggcacatgaaatgggccacaactttggaatgtttcatgacgactattcttgcaagtgtccttctacaatatgtgtgatggacaaagcactgagcttctatatacccacagacttcagttcctgcagccgtctcagctatgacaagttttttgaagataaattatcaaattgcctctttaatgctccattgcctacagatatcatatccactccaatttgtgggaaccagttggtggaaatgggagaggactgtgattgtgggacatctgaggaatgtaccaatatttgctgtgatgctaagacatgtaaaatcaaagcaacttttcaatgtgcatta

SEQ ID NO: 7849 - DNA, 3699 bp, Homo sapiens
cgtagagggaatgagtcaggctccggctccacactggcacgtagtgggcggatcgcgccggcgctgagtaggaaggagcttcagccgccagcccggaacgcagtgagtacagccactcaaaggaaagccaagtcgctttgcaggggagcgtctcatgatttttcagaaacgtgctcatggttaaaaagaaaaatcaaggctcggaataaatacattcaagcactgttaattttagcccaaagacaggcggtacttgcctggagatttgggaaaatcaacatgaaactaaaaatgaaattttagttggagtggagcaagcagtattgatcagaacataccaaatacgaattttttcaaagtctgcgtagaagtttaaattactaggaaaaatgtaaaggagaagtatttactaataaatgaaacaaaagtaataaaataaaaatgaattaatatagtttgacaaaatatcagcgaacgctgaaaagaaaacattaaaataatgtttgagactttttaggttttgtgcaggaagaattgggaaaaatgtgctggatggagtgatactgcttttcttttccacaaaaatttcattattttagagagcggtagagcctttttaaagacagtaagttattgccaattcacaatgaaataagatcacatgctctgaaatgtacaagagctgcatgcaataaacttcatttatctataggtaataactgattgatgtttattcagtagtcgaaatgcacctcatgcactctaattagcacgtcaaattagtctctccgtttcagaggtgtagggcctttgtggagccttctcaataaaataatttgccactcttgaaggttagacattctcttctatcaatgtacacataaaggttttgttttgctttgcttgttgtgaattaaaatggggagaaaatgatgtgttagctatcacccagtcatgtgtctttttagtcataggttagcttttcaagacacttcctgcatctctgacctgttgcacctctgttatcttggcacctctgttatcttagcagcaagcacctgcctcagctgacccttgagccataacccatgtaagtcactgcagggctgaacctctctttgagcctaacagtagaataataattatttttattgaatagtgttaatgtgtcaatgttgaaatgtgcctcagtgtgtcttcctcaaccacatccctatagaggatgttttcttaatagcaatgtgtttttgttttaagaaagtccacacaatttcaaatacacattttctttactaaagtttattgaccagttttgaagtgatccttgttttcagttaaactatctttaataatggtaaataacatattttgtaggttgttgtatatttaatattctctgcaagaacacataaggaacaatacatggacctttaaatatttgtcattgtgaaataaaataacaaggaaaggtgatttcaggtgtactttattcaatacatatatacaagaagttattactataacattaaatttgcaggaaaaaagaaaccactggattattctgcttctattccagagggcttattccaaagggccagtgtgcaaaatatgaatccaagatggcattgtggaaagacgctgtacctcctgtgataaaattactttggtggtgcttttttctcatgtatctcgggaaactaaaaatctgaattgtattcagtggccttttccaaatgaagctcctgaaaagtacatcaagtctaaagtgaaccagctaactcattaagactggaatcatgagcaacaatggagcagacctaacctttggttacatctcctgttttgtagctatccttttgtttggctcaaattttgtgccacttaaaaaatttgatactggtgatggaatgtttctccagtgggttctttgtgctgccatatggttggttgccttggttgtcaatctgatattacattgtccaaagttttggccttttgcaatgcttgggggctgcatttgggcaacagggaacattgctgttgtcccaattatcaaaaccattggtttaggccttggaatcttaatctggggatcatttaatgccttaactggctgggcaagctcaaggtttggctggtttggattggatgcagaagaagtatcaaatccgctgctaaattacattggagctgggctatcagtagtaagtgctttcatatttttgttcatcaaaagtgaaataccaaataacacgtgttccatggataccactccattaataacagagcatgtgagtatagtatgagagacaacttgatttgaaacataaaattaagataaatggataatacataaattttaaacacagatgaaaaagtggtgtttgctcatcactcctggctatgtaaaatatcttagcttatttattatgggtaggtctatgtagcaatcaatcaatatttccgcagttgagcttctcagcaagcacacgggtttatttattttgattaacagatctctactaggtgatatatatataaccccatttttgtaatgatttaaagattcctacaatagaggaaccctaaatactgtagaggaatgtgaaaataactttagaaagtcagaggaaggaggttttgaagttggtccaggggagaatagaccataggaggccaagaaaggtaagtgaagtcctatgagaataggaactggtatcccattctacccgaagtgaaaaacagaaaatatgataggagtcactgttttgatcttgaagaatctaaatcagtctggaatagtaaatctgaatgaaacaggagcaacttttaaaagggacctgataaagcgcaagtgtcagtagctacatatacaaaagtgacttcagggcaaagcctcattgtcatgaacccaggctctaatccttctcatctcaagaaatctctcctgtctgccctgggccagtgctatccagctgccctctgaatccagcgctcctcacccccagtggggtattgccccttggcagggtgcttatttaccccttacttcaaaattaatcttttctcctttccttcttcccctatccaaacttttatcaactaaaaccttagttaaattgacactaaagttgaatagtaattagcttaagtgtaaagagaagaggtttattaatccacaggcatctctaatcagggaaatgtttcagggagaagggaggagttggctttgggaaagggttccttgcctgcttcagggatccagacacctcctgcccaaccatcctccaaaacaatggaacaaaataataaaataaatgcagcttggtaaaagatacacagtaggctaactgcctgagatttttctaggcaataagtttaaagatccataaacagcatgattgatgggtacagaaccatgcatcatgagctccttatgatgaaagaaaccgttattgccaaaggaaaacttgacttagcacatgacaaagaattcaaatctactttcttgtctcttacaaaaataataggattataacatcaagaacacttcagttggccaggcgtgatggctcatgcccgtaatcccagcactgtgggaggtcaaggtgggcagatcacctgagttcaggagttcaagaccagcctgtccaacatggtgaaactctatctctactaagaatacaaaaaaaaaaaaaa

SEQ ID NO: 7850 - DNA, 1153 bp, Homo sapiens; identical to SEQ ID NO: 6923

SEQ ID NO: 7851 - DNA, 1286 bp, Homo sapiens
ttagagatagtttttctcatcctcaagtattgggagtccaactttgagtggaatctggactaaacttcagagtgttgccagggacggcagtatctctttgtgtgaccctggcggcttatgggacgttggcttcagacctttgtgatacaccatgctgcgtgggacgatgacggcgtggagaggaatgaggcctgaggtcacactggcttgcctcctcctagccacagcaggctgctttgctgacttgaacgaggtccctcaggtcaccgtccagcctgcgtccaccgtccagaagcccggaggcactgtgatcttgggctgcgtggtggaacctccaaggatgaatgtaacctggcgcctgaatggaaaggagctgaatggctcggatgatgctctgggtgtcctcatcacccacgggaccctcgtcatcactgcccttaacaaccacactgtgggacggtaccagtgtgtggcccggatgcctgcgggggctgtggccagcgtgccagccactgtgacactagccagtgagtctgctcctttgcctccctgccatggtgcggtccctcctcatctctcccaccctgaagcccccaccattcatgctgcctcttgttactcttagcataaaatgggccttaactgcagaaatgtcaaatcagaacagtagctgcctagtaatgcccagtgatgggggacccttgtgcccttggaaaacctcactccaagtagaggctgtatctggagtgagtgtctacagagaggggaattggtcagtgcatggcagaacttgacatggcagaactgttccgtgggccccagagcagggccgtgccgtgccttcctacttggtcatcctgtggctgtaggtgcactgtcccaactgctcacacaccttccagtcccctccctccattctcaccacagttacagtcggagcagggagagacaggacaccaagagacatgggcagggccacgtgtagtctggacagagcccacccagcccagacttggcctcctgtctctctgtgaggggcaagcatagtccgaaggcctggattataaatattagaacataatgaaaaggaaactgtgtggcaaagggataaagggatacagagaaaagaaacaaggaagagatgaggtgacagtttggaccaaggaaaatgccaagagaagacttcacactaccttttttttttctggttttgccattcttttattcatgttgttacactcagtataggatagtttattaaaatcattatgtctgtagacattcta

SEQ ID NO: 7852 - DNA, 742 bp, Homo sapiens
acagatggaagtttccagtgcatttgcaatgccggctttgaattaactacagatggaaaaaactgtgttgatcatgatgaatgtacaactaccaacatgtgtttgaatggaatgtgcatcaatgaagatggcagcttcaagtgcatctgcaaaccaggatttgtcttggctccaaatgggcgttactgtactgatgttgatgaatgccagaccccaggaatctgcatgaatgggcactgcatcaacagtgaagggtccttccgctgtgactgtcccccaggcctggctgtgggcatggatggacgtgtgtgtgttgatactcacatgcgcagtacctgctatggaggaatcaagaaaggagtgtgtgtgcgtcctttccccggtgcagtgaccaagtccgaatgctgctgtgccaatccagactatggttttggagaaccctgccagccatgccctgcaaaaaattcagctgaattccacggcctttgtagtagtggagtaggtatcactgtggatggaagagtacagcctttccagcagagccagcctctattggaaactacttgatcattcatacaagcacatcagtgcacaagttccactgcccctcggtgatatagtagtagtagtcatgttcacggctcgttataaaacgtcatgttctgaagcatccatgtttaaagtgtcctctccagtaatttcaagtatcagcaatgagaaacacttattaaatattagtaac

SEQ ID NO: 7853 - DNA, 317 bp, Homo sapiens
ttcagcagcagagtgacaccagcagcctgctgaggcagacccatcttggcaatggatatgacccccaaagtcaccagatcacgagggcccccatgctgcttgggccttgtgccagttgaagaggtggacagtcctgactcctgccaagtgagtggaggagactggtgtccccagcaccccgtaggggcctacgtaggacaggaacctggaatgcagctctccccggggccactggtgcgtgtgtcttttgaaacaccacctctcacaatttaggcagaagctgatatcccagaaagactatatattgtttttttttt

SEQ ID NO: 7854 - DNA, 672 bp, Homo sapiens
ctgtttgctaaaggcatgcgggctacagcattcaagagagggagtcgttaacaaagggaaagagataaatgtaaataagctcacatttacagaatgagcggtttgcagtaaaaagctgcggcagcccagagtctgctactttaggctgggctaacctttccctgtaaaaaaaaaaaaaaaaaaaaaaaaaaaaaaatggataaaaatatgcacttccaaagggcgagttgcccatttacatgtttattagctaattatctacaggcatcagcacattctctcatctagcacactctttcttggggaagacagatttctggaggagtgtgaaaatcaactctccttaatattaagcacccattggaggaaatctctaactacagtgcctccaggaaactcattggttattccagtcttagataaaattggtgccaggatttggttcgaactaatgtggaggaaaatatttcctaccggtccatagtgtcagagtggtgaacccctgcagccagcaggcctcctgaaaaaaaagtccatgggtgacagaagattcattgacttccaattccaagattcaaattcaagcctcagacccaggttgggcaatgctactgccaataatacttgcattgttgatgattccttcaagtataatctcaatggtgctgtcta

SEQ ID NO: 7855 - DNA, 582 bp, Homo sapiens
gatcaggaagggtcacagcagccatggtaggtgaatggagcagcttttccttcctttcctgctttcagagcctactcagtgccaaacttacatcaaaagctcagcaagtactgattgattaatccctcttgcctacggcaaaatggccctgagggctatctctcagctctgcactggcctctgagctgtctgccaggcagggctctagaaaagagtcccaaggaagagaataaggttccccaaatcagcttcacactgcaacaaggagagaggaggaaatggtgggagactgacctgaggaacaaggcttgttagagtgctgtgcaagatgtctggtaggggccccctttgcttccctggtggccactggattgtgtttctttggggtggcactgttctgtggctgtggacatgaagccctcactggcacagaaaagctaattgagacctatttctccaaaaactaccaagactatgagtatctcatcaatgtgatccatgccttccagtatgtcatctatggaactgcctctttcttcttcctttatggggccctcctgctggctgagggcttctacacca

SEQ ID NO: 7856 - DNA, 704 bp, Homo sapiens
gcgaagccaggagcccgatcgagatgatgatggttatgcagcccgagggtctgggggccggggaggggcgctttgcgggcggcggcgggggcggcgagtacatggaacaggaggaggactgggaccgcgacctgctgctggacccggcctgggagaagcagcagcggaaagaaaacgaaagctcagagagggaaagggactggcccaggatgcacagcaagtcagtggctgagctgagctgagacttgaatccagaaatacaaggctctgagacctaccctgactgaggagacaggactgtgccctacatcccccagagccagtcgtagggtttgagtgctgtcctctgcccctagaccttcactgcctggtgcaactcacacctgcgcaaggcaggcacccagatcgagaacatcgaggaagatttccgcaatggcctcaaactcatgctgctcctggaggtcatttcaggtgagaggctgcctaggccagataaaggcaagatgcgcttccacaaaatcgccaacgttaacaaggccctggacttcattgccagcaagggggttaaactggtgtccattggtgctgaagagattgttgacgggaacctgaagatgaccctgggcatgatctggaccatcatccttcgcttcgccatccaggacatctctgtggaagaaacctcagccaaggaaggcttgctt

SEQ ID NO: 7857 - DNA, 2232 bp, Homo sapiens
gcctgcacgcagccccgtagaatgagaaggggacggtcaggccgcggggaaagcactgatcgcatttgccacccaagaggtctttggtcacctctaggagagcaattgtactgggcacgcttactaatctgcttacaggaatggagaaagaatgattggactgattcaaggccggaggttagctgagcagacatctgaatgggactccgagtgccttacatccctgcagccccttcctcttcctacacccccagcagcaaatgaggcacacctgcagacagcagctatctctctgtggacagtggtggccgccgtgcaggctatagagaggaaggtggagatccacagccggcgactcctacacctggaaggtcggacagggacagcagagaagaaactagccagctgtgaaaagacagttaccgagcttgggaaccagctggagggcaagtgggccgtgctgggaaccctgctgcaggagtacgggctgctgcagaggcggctggagaacttggagaacctgctgcgcaacaggaacttctggatcctgcggctccctccaggtattaagggagatatcccaaaggtgcctgtggcatttgatgatgtctccatctacttttccactccagagtgggaaaaattagaagaatggcaaaaggaactttacaagaatatcatgaagggcaactacgagtctctcatctccatggattatgctataaatcaacctgatgtcttatctcagattcaaccagaaggggaacataatacagaggaccaggcagggccagaggaaagtgagattcccacagaccccagtgaagagcctggtatttcaacatcagatattctgtcttggattaaacaagaagaagagcctcaggttggggccccaccggagtccaaggagagtgacgtgtacaaaagcacttatgctgatgaagagcttgtcatcaaagctgaaggccttgctagatcctcgttgtgccctgaggttccagtccctttctcttctccaccagcagcagcaaaggatgctttttcagatgtggctttcaaaagccagcagtctacatccatgacaccttttggacgtccagccactgacctgcctgaagcctctgagggacaagtgacttttactcagttgggtagctatcccctcccacctccagttggcgagcaggtgttctcatgccaccactgtggcaagaatctcagccaagacatgttgctgacccaccaatgtagccatgctactgagcaccccttaccctgtgcccagtgccctaagcactttactccacaggcggacctcagcagcacctcccaggaccatgccagcgagacaccccccacctgcccacactgtgccaggacttttactcacccatcaagacttacctaccatcttcgggtccataacagcactgagcgtcctttcccctgtcctgattgccccaagcgctttgctgaccaggctcgactcaccagccaccggagagctcatgcaagcgaaaggcccttccgctgtgcccagtgcggcaggagcttcagcttgaaaatcagcctcctgctccaccagcggggtcatgcacaagagcgccctttctcctgccctcagtgtggcattgacttcaacggccactcggccctgatccgccaccagatgatccacacaggcgagcgtccttacccctgcactgactgcagtaagagcttcatgcgcaaggagcacctgctgaaccaccggcggctgcacacaggcgagcggcccttcagttgtcctcactgtggcaagagcttcatccgcaagcaccacctaatgaaacaccagcgcatccacaccggggagcggccctacccctgctcctactgtggcaggagcttccgctacaaacagacactcaaggaccacctccgttcaggccacaatggaggctgtgggggtgatagtgacccatcaggtcagccacccaacccaccaggtcccctcataactgggcttgaaacttctggcctgggtgtcaacactgaaggtctagagaccaaccagtggtatggggaagggagtggagggggagttttgtaaatccaaatctctgtggcttcatgcttgtatatgctcacagcagggcacaaaatccaagagaaggtctgtgagccccatccaacacccacagtaattattatctggcacatcaatgaatttggggtcctatacacttg

SEQ ID NO: 7858 - DNA, 4332 bp, Homo sapiens
actccgctggcatggaggaggaggaggaggtggaggagcgagaggaggaggaggaggcggcggcggcggcggcggcgagcagttgatcattgtgatggtggcaggagcagcggcggcagcggcagcccagccgagcgttaggtgctgctctctgcgcggcgttttgcaaaggacttcaccgatctacttttgcagtcgcctcggactgtccatgtgtttacttcccccagcccgaggattcgatatctaggttcctgtgaaatgcaactgagcagccaaagtactttgagaacacggggcggcataaacaccaaaacttttttgtggaaggaaaatgcaataagcaagcttgccgttttccgatgcggtgtggagtgagtgtgtgtcgcgcgtgtccgcactggaggcatatgcttgtgtgtgtacatggggtgtgtttttcggtatgtagggagaaaatgcttgccaaccaccggaaatctcctggaatttattagaaaataatggattataaaaagaaggcaagcaaggagcggatctccccttgagttgcaacccgatttgctgctggctcagtttgttgtgattctttttgttgataggtgtctgatggtattccgataacgttccccccttttcttccccttgagcttttacagtttaaaaaaaggaaacaaaaaccaccccaaaatctccccccccgtttttttcgccccgtcgggatcgccgtttccatccatgtgcttgcgtctcccccgcgttccacttaaactattttaatccttggacccaaggaggaggctgataggggggtggataaaaaaagttcttccaaaatagtgtgcccggggagcaggatgggggatttcgcagcccccgctgctgccgcgaatggcagtagtatttgcatcaacagtagcctgaacagcagcctcggcggggccgggatcggtgtgaataatactcccaatagtactcccgctgctccgagtagcaatcacccggcagccggtggatgcggcggctccgggggccccggcggcggttcggcggccgttcccaagcacagcaccgtggtggagcggctccgccagcgcatcgagggctgccgtcggcaccacgtcaactgcgagaacaggtaccagcaggctcaggtggagcagctggagctggagcgccgggacaccgtgagcctctaccagcggaccctggagcagagggccaagaaatcgggcgccggcaccggcaaacagcagcacccgagcaaaccccagcaagatgcggaggctgcctcggcggagcagaggaaccacacgctgatcatgctacaagagactgtgaaaaggaagttggaaggagctcgatcaccacttaatggagaccagcagaatggtgcttgtgatgggaatttttctccgactagcaaacgaattcgaaaggacatttctgcggggatggaagccatcaacaatttgcccagtaacatgccactgccttcagcttctcctcttcaccaacttgacctgaaaccttctttgcccttgcagaacagtggaactcacactcctgggcttctagaagatctaagtaagaatggtaggctccctgagattaaacttcctgtcaacggttgcagtgacctggaggatagcttcaccatcttgcagagcaaagacctcaaacaagaacctctcgatgaccctacttgcatagacacatcagaaacatctctttcaaatcagaacaagctgttctcagacattaatctgaatgatcaggagtggcaagaattaatagatgaattggccaacacggttcctgaggatgacatacaggacctgttcaacgaagactttgaagagaagaaggagccagaattctcgcagccagcaactgagacccctctctcccaggagagtgcgagcgtgaagagcgacccctctcactctcccttcgcacatgtctccatgggatctccccaggcgaggccttcttcttctggtcctcccttttctactgtctccacggccactagtttaccttctgttgccagcactcccgcagctccaaaccctgcaagctcaccagcaaactgtgctgtccagtcccctcaaactccaaaccaagcccacactccaggccaagctccacctcggcctggaaatggttatctcctgaatccggcagcagtgacagtggccggttcagcgtcagggcctgtggctgtgcccagctctgacatgtctccagcagaacagctcaaacagatggctgcacagcagcaacaaagggccaaactcatgcagcagaaacagcaacagcaacagcagcagcagcagcagcagcagcagcagcagcagcagcagcagcagcagcagcagcaacagcactcaaatcagacttcaaattggtctcccttaggacctccctctagtccatatggagcagcttttactgcagaaaaaccaaatagcccaatgatgtacccccaagcctttaacaaccaaaaccctatagtgcctccaatggcaaacaacctgcagaagacaacaatgaataactacctccctcagaatcacatgaatatgatcaatcagcagccaaataacttgggtacaaactccttaaacaaacagcacaatattctgacttatggcaacactaaacccctgacccacttcaatgcagacctgagtcagaggatgacaccaccagtggccaaccccaacaaaaaccccttgatgccgtatatccagcagcagcaacagcagcagcaacagcaacagcagcagcagcagcagcagcagccgccacctccacagctccaggcccccagggcacacctgagcgaagaccagaaacgcctgcttctcatgaagcagaaaggagtgatgaatcagcccatggcttacgctgcacttccatcccacggtcaggagcagcatccagttggacttccccgaaccacaggccccatgcagtcctccgtgcccccaggctcaggtggcatggtctcaggagccagtcccgcaggccccggcttcctgggcagccagccccaagcagccatcatgaagcagatgctcattgatcagcgggcccagttgatagagcagcagaagcaacagttcctgcgggagcaaaggcagcagcagcagcagcagcagcagcagattttggcggaacagcagttgcagcaatcacatctaccccggcagcacctccagccacagcggaatccatacccagtgcagcaggtcaatcagtttcaaggttctccccaggatatagcagccgtaagaagccaagcagccctccagagcatgcgaacgtcacggctgatggcacagaacgcaggcatgatgggaataggaccctcccagaaccctgggacgatggccaccgcagctgcgcagtcggagatgggactggccccttatagcaccacgcctaccagccaaccaggaatgtacaatatgagcacaggcatgacccaaatgttgcagcatccaaaccaaagtggcatgagcatcacacataaccaagcccagggaccgaggcaacctgcctctgggcagggggttggaatggtgagtggctttggtcagagcatgctggtgaactcagccattacccagcaacatccacagatgaaagggccagtaggccaggccttgcctaggccccaagcccctccaaggctgcagagccttatgggaacagtccagcaaggagcacaaagctggcaacagaggagcttgcagggcatgcctgggaggactagtggagaattgggaccattcaacaatggcgccagctaccctcttcaagctgggcagccgagactgaccaagcagcacttcccacagggactgagccagtcagtcgtggatgctaacacgggcacagtgaggaccctcaacccagctgccatgggtcggcagatgatgccatcgctcccggggcagcaaggcaccagccaggcgaggccaatggtcatgtctggcctgagccagggagtcccaggcatgccagcgttcagccagcccccagcacagcagcagatacccagtggcagctttgctccaagcagccagagccaagcctatgagcggaatgcccctcaggacgtgtcatacaattacagtggcgacggagctgggggttccttccctggcctcccggacggtgcagaccttgtggactccatcatcaaaggcgggccaggggacgagtggatgcaggagcttgatgaattgtttggtaacccctaatcaagagaggccccaagatccacaactcgagtggttaaagcttaaaaagtgaaaaaga

SEQ ID NO: 7859 - DNA, 1130 bp, Homo sapiens
caggtgaaagctggaatagaagctcattcggaagccaaaaccagtggactcctgtgggctggattggcactgctgtccattcagggtggggcactggcctggctcacgtggtgggtgtactcctgggatatcatggagccagttacatacttcatcacatttgcaaattctatggtcttttttgcatactttatagtcactcgacaggtgagtagtttgttaggaaaatggtaagttagaacatctttgcaaagaatgtcttatctaagcaatgagcaaaaaagcctttttatttactgaattactgccatctggtttttatgagctggtaaattttttattgtttttcacaagactgaatgaagactcacaacacagagaaattatatataacttctttggagaagtaattagtgtaacacacaaattcctccattgggataaatatgtgttctctgtgccctcatttataaaaaaaactgaatttgcattgcaaaacattcagtaacatcagctttgcctcatggttatttaatatgccaaaaatctcccttttcttatttcttccttcttctttcccattatgtgtaatttctcttcccagcttgcctgtttttgaaaggagcagcagatcttaaatgagactaaatgttttgtgttggcttatgcttactctcatggccattgcaaatatttcactcattcatctgccttcttttgctttggtgttgctgagtcaagtatctttcttgcagaggcattatgttcattcaaaacatgttgttttcttctctctctctttttttttaaggattatacttactcagctgttaagagtaggcaatttcttcagttcttccacaagaaatcaaagcaacagcactttgatgtgcagcaatacaacaagttaaaagaagaccttgctaaggctaaagaatccctgaaacaggcgcgtcattctctctgtttgcaaatgcaagtagaagaactcaatgaaaagaattaatcttacagttttaaatgtcgtcagattttccattatgtattgattttgcaacttaggatgtttttgagtcccatggttcattttgattgtttaatctttgttattaaattcttgtaaaacagaa

SEQ ID NO: 7860 - DNA, 826 bp, Homo sapiens
acccactccttgccagttgtggtgatctccaacatctgtcagatgccaaatgcctgggcgtccatcctgtggtacaacatgctgaccaacaatcccaagaatgtaaacttttttaccaagcccccaattggaacctgggatcaagtggccgaggtcctgagctggcagttctcctccaccaccaagcgaggactgagcatcgagcagctgactacactggcagagaaactcttgggacctggtgtgaattattcagggtgtcagatcacatgggctaaattttgcaaagtaagcaatcttgttaaattctcgtgggaatgggaatgctcacctgcacggctgtcgttgagggctctggcttgaaggccctgaactcttggtccagcggccagtaggacctgcctgaaggtagacgggcctgaggatttgggtgatgcactgcacccctaggaagggaagggctgggatggcagtagacttggctttcccattactcttttctccaggaaaacatggctggcaagggcttctccttctgggtctggctggacaatatcattgaccttgtgaaaaagtacatcctggccctttggaacgaagggtaggttggacagagtgtgcacagatgtaaccaagtcccctgctctcagcaagccagtggcaggggatggatgccctgttagcaataacaacattgttcctcctccttggctccaggtacatcatgggctttatcagtaaggagcgggagcgggccatcttgagcactaagcctccaggcaccttcctgctaagattcagtgaaagcagcaaagaaggaggcgtc

SEQ ID NO: 7861 - DNA, 1062 bp, Homo sapiens
gcaggttagagcctggcaatgccgtttgggtgtgtgactctgggcgacaagaagaactataaccagccatcggaggtgactgacagatatgatttgggacaggtcatcaagactgaggagttttgtgaaatcttccgggccaaggacaagacgacaggcaagctgcacacctgcaagaagttccagaagcgggacggccgcaaggtgcggaaagctgccaagaacgagataggcatcctcaagatggtgaagcatcccaacatcctacagctggtggatgtgtttgtgacccgcaaggagtactttatcttcctggagctgtgagtgtgggtctggggacccaagattccccagcgcccagggctttcacctgtcccaccctctgcagctaaggaaaccccctttctggacccttggcgtcccaggtccctgtgccttgctcagccagctgcctggcgtaggcagctcacccaagtgctcctgccctacccctgattctgcccacgccaggctcaggggctggtgtccctcagggccacggggagggaggtgtttgactggatcctggaccagggctactactcggagcgagacacaagcaacgtggtacggcaagtcctggaggccgtggcctatttgcactcactcaagatcgtgcacaggaatctcaagctggagaacctggtttactacaaccggctgaagaactcgaagattgtcatcagtgacttccatctggctaagctagaaaatggcctcatcaaggagccctgtgggacccccgagtatctggccccagaggtggtaggccggcagcggtatggacgccctgtggactgctgggccattggagtcatcatgtacatcctgctttcaggcaatccacctttctatgaggaggtggaagaagatgattatgagaaccatgataagaatctcttccgcaagatcctggctggtgactatgagtttgactctccatattgggatgatatttcgcaggcagccaaagacctggtcacaaggctgatggaggtggagcaagaccagcggatcactgca

SEQ ID NO: 7862 - DNA, 1963 bp, Homo sapiens
gcatttccagcaggagctgcgagcacagtgctggctcacaacaagatgctcaaggtgtcagccgtactgtgtgtgtgtgcagccgcttggtgcagtcagtctctcgcagctgccgcggcggtggctgcagccggggggcggtcggacggcggtaattttctggatgataaacaatggctcaccacaatctctcagtatgacaaggaagtcggacagtggaacaaattccgagacgatgattatttccgcacttggagtccaggaaaacccttcgatcaggctttagatccagctaaggatccatgcttaaagatgaaatgtagtcgccataaagtatgcattgctcaagattctcagactgcagtctgcattagtcaccggaggcttacacacaggatgaaagaagcaggagtagaccataggcagtggaggggtcccatattatccacctgcaagcagtgcccagtggtctatcccagccctgtttgtggttcagatggtcatacctactcttttcagtgcaaactagaatatcaggcatgtgtcttaggaaaacagatctcagtcaaatgtgaaggacattgcccatgtccttcagataagcccaccagtacaagcagaaatgttaagagaggattcgataccagcatcttgccaatttgcaaggactcacttggctggatgtttaacagacttgatacaaactatgacctgctattggaccagtcagagctcagaagcatttaccttgataagaatgaacagtgtaccaaggcattcttcaattcttgtgacacatacaaggacagtttaatatctaataatgagtggtgctactgcttccagagacagcaagacccaccttgccagactgagctcagcaatattcagaagcggcaaggggtaaagaagctcctaggacagtatatccccctgtgtgatgaagatggttactacaagccaacacaatgtcatggcagtgttggacagtgctggtgtgttgacagatatggaaatgaagtcatgggatccagaataaatggtgttgcagattgtgctatagattttgagatctccggagattttgctagtggcgattttcatgaatggactgatgatgaggatgatgaagacgatattatgaatgatgaagatgaaattgaagatgatgatgaagatgaaggggatgatgatgatggtggtgatgaccatgatgtatacatttgattgatgacagttgaaatcaataaattctacatttctaatatttacaaaaatgatagcctatttaaaattatcttcttccccaataacaaaatgattctaaacctcacatatattttgtataattatttgaaaaattgcagctaaagttatagaactttatgtttaaataagaatcatttgctttgagtttttatattccttacacaaaaagaaaatacatatgcagtctagtcagacaaaataaagttttgaagtgctactataataagtttttcacgagaacaaactttgtaaatcttccataagcaaaatgacagctagtgcttgggatcgtacatgttaattttctgaaagataattctaagtgaaatttaaaataaataaatttttaatgacctgggtcttaaggatttaggaaaaatatgcatgctttaattgcatttccaaagtagcatcttgctagacctagttgagtcaggataacagagagataccacatggcaagaaaaacaaagtgacaattgtagagtcctcaattgtgtttacattaatagtggtgtttttacctatgaaattattctggatctaataggacattttacaaaatggcaagtatggaaaaccatggattctgaaagttaaaaatttagttgttctccccaatgtgtattttaatttggatggcagtctcatgcagattttttaaaagattctttaataacatgatttgtttgcc

SEQ ID NO: 7863 - DNA, 596 bp, Homo sapiens
ctccctctctccctttccaaatgattcagaagtcgataagaccaggagaagtgaagatgtaacatgttatctgtcgctcctcttagctggcggagagaatttacatttaaagattagcagagtgagaaagagaaatctgccttttgttgtgtggggtgaggaggaggcatctacccctggccttgacgctatctcccatcacctctgctatccagacaggactcaccgagaaaagattgatctctgggctggtgaacataatctctgtcccagtcagaaaaggagagaggaaattagcagagcgattggtggagaatgatatctgtcaaaagaaacacttggagagcactgagtttagtaataggtgactgccggaaaaaagggaactttgaatattgtcaagatcgtactgagaagcactccacaatgccagactcacctgtggatgtgaagacgcaatctaggctgactcctccaacaatgccacctcccccaactactcaaggagctccaagaaccagttcatttacaccgacaacgttaactaatggcacgagccattctcctacagccttgaatggcgccccctcaccacc

SEQ ID NO: 7864 - DNA, 3798 bp, Homo sapiens
tatgatctcgtgaaatcttgagagaaactgaatgacgaatgaaactattgttcctgtttcacacagaagaaaactgaggttaaaaggggtaaagtaattttgcatggcatgaagtagaaattcaaagtacaggaatttgaacttggttctgtccttttctgaagcccttgaccactatagactcaaacatcaccttgtttttccactcattcaacacttttttttttaaattatctaataggttggcactcatcatgagcccctgttctcattctgcaaatggtgaagctctctattgtcctgaccccacagttcctgtcccatgaccagggccagctcaccaaggagctgcagcagcatgtaaagtcagtgacatgcccatgcgagtacctgaggaaggttatcaatactctggctgaccatcatcatcgtgggactgactttggtggaagtccttggttacatgtcattattgcgtttccgacaagttataaagttgtcattaccctctggatagtttacctttgggtgtctctcctgaagactatcttctggtctcgaaatggacatgatggatccacggatgtacagcagagagcctggaggtccaaccgccgtagacaggaagggctgaggtccatttgtatgcacacaaagaaaagagtttcttcctttcgaggaaataaaattggcctgaaagacgtcattactctacggagacatgtggaaacaaaagttagagctaaaatccgtaagaggaaggtgacaacgaaaatcaaccatcatgacaaaatcaatggaaagaggaagaccgccagaaaacagaaaatgtttcaacgtgcgcaagagttgcggcggcgagcagaggactaccacaaatgcaaaatccccccttctgcaagaaaggctctttgcaactgggtcagaatggcggcagcggagcatcgtcattcttcaggattgccctactggccctacctcacagctgaaactttaaaaaacaggatgggccaccagccacctcctccaactcaacaacattctataactgataactccctgagcctcaagacacctcccgagtgtctgctcactccccttccaccctcagcggatgataatctcaagacacctcccgagtgtgtgctcactccccttccaccctcagcggatgataatctcaagacacctcccgagtgtgtgctcactccccttccaccctcagcggatgataatctcaagacacctcctgagtgtctgctcactccccttccaccctcagcggatgataatctcaagacacctcccgagtgtctgctcactccccttccaccctcagctctaccctcagctccaccctcagcggatgataatctcaagacacgtgccgagtgtctgctccatccccttccaccctcagcggatgataatctcaagacaccttccgagcgtcagctcactccccttccaccctcagctccaccctcagcagatgataatatcaagacacctgccgagcgtctgcgggggccgcttccaccctcagcggatgataatctcaagacaccttccgagcgtcagctcactccccttccaccctcagctccaccctcagcagatgataatatcaagacacctgctgagcgtctgcgggggccgcttccaccctcagcggatgataatctcaagacaccttccgagcgtcagctcactccccttccaccctcagctccaccctcagcagatgataatatcaagacacctgccgagcgtctgcgggggccgcttccaccctcagcggatgataatctcaagacaccttccgagcgtcagctcactgcccttccaccctcagcagatgataatatcaagacacctgccgagcgtctgcgggggccgcttccaccctcagcggatgataatctcaagacaccttccgagcgtcagctcactccccttccaccctcagctccaccctcagcagatgataatatcaagacacctgccttccaccctcagcggatgatctcaagacaccttccgagcgtcagctcactccccttccaccctcagctccaccctcagcagatgataatatcaagatacctgctgagcgtctgcggattccgcttccaccatcagccgatgataatctcaagacaccttccgagcgtcagctcactccccttccaccctcagctccaccctcagcagatgataatatcaagacacctgccgagcgtctgcgggggccgcttccaccctgagcggatgataatctcaagacaccttccgagcgtcagctcactccccttccaccctcagctccaccctcagcagatgataatatcaagacacctgccgagcgtctgcgggggccgcttccaccctcagcagatgataatctcaagacaccttccgagcgtcagctcactccccttccaccctcagctccaccctcagcagatgataatatcaagacacctgccgagcgtctgcgggggccgcttccaccctcagcggatgataatctcaagacaccttccgagcgtcagctcactccccttccaccctcagctccaccctcagcagatgataatatcaagacacctgccgagcgtctgcgggggccgcttccaccctcagcagatgataatctcaagacaccttccgagcgtcagctcactccccttccaccctcagctccaccctcagcagatgataatatcaagacacctgccgagcgtctgcgggccgcttccaccctcagcggatgataatctcaagacaccttccgagcgtcagctcactccctttccaccctcagctccaccctcagcagatgataatatcaagacacctgccgagcgtctgcgggagcgtctgcgggggccgcttccaccctcagcggatgataatctcaagacaccttccgagcgtcagctcactccccttccaccctcagctccaccctcagcagatgataatatcaagacacctgccgagcgtctgcgggggccgcttccaccctcagcggatgataatctcaagacaccttccgagcgtcagctcactccccttccaccctcagctccaccctcagcagatgataatatcaagacacctgccgagcgtctgcgggggccgcttccaccctcagcggatgataatctcaagacaccttccgagcgtcagctcactccccttccaccctcagctccaccctcagcagatgataatatcaagacacctgccgagcgtctgcgggggccgcttccaccctcagccgatgataatctcaagacacctcccttagctactcaggaggctgaggcagaaaaaccacgcaaacccaagaggcagagggcggctgagatggaaccacctcccgaacccaagaggcggagggtcggtgacgtggaaccgtcacgcaaacccaagaggcggagggccgctgacgtggaaccatcatcacccgaacccaagaggcggagggtcggtgatgtggaaccgtcacgcaaacccaagaggcggagggccgctgacgtggaaccatcatcacccgaacccaagaggcggagggtcggtgacgtggaaccgtcacgcaaacccaagaggcggagggccgctgacgtggaaccatcattacccgaacccaagaggcggaggttgagctgagaagaggccagtgcactcaagcctgagcaataagaataaaaccgagtagaacaaaataaaaaattcaaaaaacaaaacaaaacccacactccaaaaactaacaaagaataaataaataat

SEQ ID NO: 7865 - DNA, 838 bp, Homo sapiens
agctcacggatcttgttgttgttgagctgcaagatgaagaggttgaccagcggggagagcaacccccggggcagctcagtgaccttgttgtggtccaggtagaggttgcttatggaaccacagagaacagtcccgtgacattcgcgcacttccctgaggacactgtggagcagaaggcagaaagcgtgggcagaattatgcctcacacggaggtgagcccctgaccaagactccaaagtcccacctcccgtcacccagctggggtgcacccagctgggacatcggttgctttcagtgagagagtcaaatggctcactcaggatgcctagagccccccagcagcaggggtgtgctaggcctggcccggagtgttctctgtgggctaagcatgaaaggggaagagctggaacagtggctgtgagcggctgccagctgaacttctccgcggcctcccttcctgtctgaggtgtgtttttgccaagcccactgtctgtttcagggcagccagggtagcctcaaagaggagccagagcacagagagttttcctacacagcttcttttcctccagtggtgctcgcctctcgctttagcagagttcttcttcttgcttggcgtaaacacttcatttcccaagcagcctatccctttggggcggtccctttgcccctcaaaggttgccccagagtgcacctgaatctcaaatgcccagccatgcctcctttcctgctccaacactggggctgtgccagctggctcctgatttcccctgcacccttctgctcccgcccctgggggatcgctgcccccgtgcacaagcagctgcttcccctggggctg

SEQ ID NO: 7866 - DNA, 541 bp, Homo sapiens
atgaactttctgctgtcttgggtgcattggagccttgccttgctgctctacctccaccatgccaagtggtcccaggctgcacccatggcagaaggaggagggcagaatcatcacgaagtggtgaagttcatggatgtctatcagcgcagctactgccatccaatcgagaccctggtggacatcttccaggagtaccctgatgagatcgagtacatcttcaagccatcctgtgtgcccctgatgcgatgcgggggctgctgcaatgacgagggcctggagtgtgtgcccactgaggagtccaacatcaccatgcagattatgcggatcaaacctcaccaaggccagcacataggagagatgagcttcctacagcacaacaaatgtgaatgcagaccaaagaaagatagagcaagacaagaaaatccctgtgggccttgctcagagcggagaaagcatttgtttgtacaagatccgcagacgtgtaaatgttcctgcaaaaacacagactcgcgttgcaagatgtgacaagccgaggcggtga

SEQ ID NO: 7867 - DNA, 1786 bp, Homo sapiens
aaaaacaatgctagctttcaaagcgttgaggtgcaggcctgcagacggacggacggaccgaccgacactactttgggagtaggaagcagcagctcctggtcgccagttaggaagggaagcagggacacatagggcatatattccagaacttcggggcttgtcccctcaatgtgcggcctaacaaataagccgcccgtggtccgcgctgtgggtgacccttggcgccttcgaggtctggagccctagggtaaataaggaaacggggcgcctctagagttttaaatgaactctgttattggaagcttcagtagggaccctgaaaacaattaacgtcttaattagcattttaatgtctccattattacggcgcgggctctagctcagccctttaccttaccttctcaccgttaacaggggagggggattgtatttttagttcatctttttatgtttttgagttgttatcctgtctgtctgattccagcctcgagggtttgatgatgcggcccgagcctggctgtggtcgcctgtcggggctggagcgggaccctcagccgggccgggcctgggggctaacgttttcacagtgcgccctgagtttccttgggttactgctgggaccgcgcaggaggaagcaaagagtttttcgagctagaccaacaggaaacacattgacggaaatgttgccatagcccatggggtggctttaactggccgcccccgcgggctgggtgtgaaatcagaggaggccgcggctcccccggccaggattggaggctcctcgcgcaacctaatgcgggtgtccgggcccgagcgcttcccgcgcagccaggccttgtcggtgcagcagccccgctcctccccaacacgcacacacccggtgttcgcaagtgcggctcaccaagggagatccaagggggcaaaaagttatgtataaatccgagagccactggggaaagagggtcgtggtattgtaagcccagccggtagtgcccattctttttggggttaaaggcaaacctctactctggagccccttcttgcagaggcctctgcataaaaggaaaggcggccaggtgagattctccaacgaccagaccatcgagctggagaagaaattcgagacgcagaaatatctctctccgcccgagaggaagcgtctggccaagatgctgcagctcagcgagagacaggtcaaaacctggtttcagaatcgacgcgctaaatggaggagactaaaacaggagaaccctcaaagcaataaaaaagaagaactggaaagtttggacagttcctgtgatcagaggcaagatttgcccagtgaacagaataaaggtgcttctttggatagctctcaatgttcgccctcccctgcctcccaggaagaccttgaatcagagatttcagaggattctgatcaggaagtggacattgagggcgataaaagctattttaatgctggatgatgaccactggcattggcatgttcagaaaactggatttaggaataatgttttgctacagaaaatcttcatagaagaactggaaggctatataagaaagggaatcaattctctggtattctggaaacctaaaaatatttggtgcactgctcaattaacaaacctacatggagaccttaattttgacttaacaaatagtttatgtactgctcttaggttgttttgataaagtgacattatagtgattaaattcttccccctttaaaaaaacagttagtggttttcactatttataaaaaattaattttgaactttttgttaaa

SEQ ID NO: 7868 - DNA, 563 bp, Homo sapiens
agatgcacaggaggagaagcaggagctgtcgggaagatcagaagccagtcatggatgaccagcgcgaccttatctccaacaatgagcaactgcccatgctgggccggcgccctggggccccggagagcaagtgcagccgcggagccctgtacacaggcttttccatcctggtgactctgctcctcgctggccaggccaccaccgcctacttcctgtaccagcagcagggccggctggacaaactgacagtcacctcccagaacctgcagctggagaacctgcgcatgaagcttcccaagccccatgcagaatgccaccaagtatggcaacatgacagaggaccatgtgatgcacctgctccagaatgctgaccccctgaaggtgtacccgccactgaaggggagcttcccggagaacctgagacaccttaagaacaccatggagaccatagactggaaggtctttgagagctggatgcaccattggctcctgtttgaaatgagcaggcactccttggagcaaaagcccactgacgctccaccgaaaggtacagggagtgggag

SEQ ID NO: 7869 - DNA, 4982 bp, Homo sapiens
tctttttctttttaatttgaagaaaaatcatcagtcttggaatacagaagagaaactagaaatatacgtattttgtttcacatttgaacagtcattcttgaggaatactccatacctgagtagacagccatgtggccatcgcagctactaattttcatgatgctcttagctccaataattcatggtggcaagcacagtgaacgacatcctgcccttgctgctccattgcgacacgctgagcgcagcccaggaggcgctcttccacccagacatctgcttcagcagccagctgcagagcgcaccgctgctcatcgtggacaagggccccgtggagctaccagaggagttcgcggtccaggtgcccaaggagcacagattgcagcgcaagctttcagccgtgccccaattccaatggctgtggtccgcagagagctatcctgtgagagctatcctatagagcttcgctgtccaggaacagacgtcatcatgatagaaagtgccaactatggcaggactgatgacaaaatttgtgactctgaccctgctcagatggagaatatccgatgttatctgccagatgcctataagattatgtctcaaagatgcaataacagaacccagtgtgcagtggtggcaggtcctgatgtttttccagacccgtgtccaggaacctataaataccttgaagtgcagtatgaatgtgtcccttacaaagtggaacaaaaagtttttctttgtcctggactactaaaaggagtataccagagtgaacatttgtttgagtccgaccaccaatctggggcgtggtgcaaagaccctctgcaggcatctgacaagatttattatatgccctggactccctacagaactgataccctgactgagtattcatccaaggatgacttcattgctggaagaccaactacaacctacaagctccctcacagggtggatggcacaggatttgtagtgtatgatggagctttgttcttcaacaaagagcgcaccaggaacatagtaaagtttgatttgcggactaggataaagagtggagaggctatcatagcaaatgccaattaccatgatacctccccttaccgatggggaggcaaatctgacatagacctggcagtagatgagaatgggctatgggtaatctatgcaacagaacaaaacaatggtaaaattgtcattagtcaattgaacccttacaccctacggatcgaaggaacatgggatactgcatatgataaaaggtcagcttccaatgcctttatgatttgtggaattctgtatgtggtcaaatctgtatatgaggatgatgacaatgaggctactggaaataagattgactacatttacaacactgaccaaagcaaggatagtttggtggatgtaccctttcctaattcataccagtacattgcagctgtggattacaaccccagggacaacctactttatgtatggaataactatcacgtcgtgaaatattctttggattttggacctctggatagtagatcagggcaggcacatcatggacaagtttcatacatttctccgccaattcaccttgactctgagctagaaagaccctctgttaaagatatctctaccacaggacctcttggcatgggaagcactaccaccagtaccacccttcggaccacaactttgagcccaggaaggagtaccaccccgtcagtgtcaggaagaagaaaccggagtactagtaccccatctccagctgtcgaggtacttgatgacatgaccacacaccttccatcagcatcgtcccaaatcccagctctcgaagagagctgtgaggctgtggaagcccgagaaatcatgtggtttaagactcgtcaaggacagatagcaaagcagccatgccctgcaggaactataggtgtatcaacttatctatgccttgctcctgatggaatttgggatccccaaggtccagatctcagcaactgttcttctccttgggtcaatcatataacacagaagttgaaatctggtgaaacagctgccaacattgctagagagctggctgaacagacaagaaatcacttgaatgctggggacatcacctactctgtccgggccatggaccagctggtaggcctcctagatgtacagcttcggaacttgaccccaggtggaaaagatagtgctgcccggagtttgaacaagcttcagaaaagagagcgctcttgcagagcctatgtccaggcaatggtcgagacagttaacaacctccttcagccacaagctttgaatgcatggagagacctgactacgagtgatcagctgcgtgcggccaccatgttgcttcatactgtggaggaaagtgcttttgtgctggctgataaccttttgaagactgacattgtcagggagaatacagacaatattaaattggaagttgcaagactgagcacagaaggaaacttagaagacctaaaatttccagaaaacatgggccatggaagcactatccagctgtctgcaaataccttaaagcaaaatggccgaaatggagagatcagagtggcctttgtcctgtataacaacttgggtccttatttatccacggagaatgccagtatgaagttgggaacggaagctttgtccacaaatcattctgttattgtcaattcccctgttattacggcagcaataaacaaagagttcagtaacaaggtttatttggctgatcctgtggtatttactgttaaacatatcaagcagtcagaggaaaatttcaaccctaactgttcattttggagctactccaagcgtacaatgacaggttattggtcaacacaaggctgtcggctcctgacaacaaataagacacatactacatgctcttgtaaccacctaacaaattttgcagtactgatggcacatgtggaagttaagcacagtgatgcggtccatgacctccttctggatgtgatcacgtgggttggaattttgctgtcccttgtttgtctcctgatttgcatcttcacattttgctttttccgggggctccagagtgaccgtaacaccatccacaagaacctctgcatcagtctctttgtagcagagctgctcttcctgattgggatcaaccgaactgaccaaccaattgcctgtgctgttttcgctgccctgttacatttcttcttcttggctgccttcacctggatgttcctggagggggtgcagctttatatcatgctggtggaggtttttgagagtgaacattcacgtaggaaatacttttatctggtcggctatgggatgcctgcactcattgtggctgtgtcagctgcagtagactacaggagttatggaacagataaagtatgttggctccgacttgacacctacttcatttggagttttataggaccagcaactttgataattatgcttaatgtaatcttccttgggattgctttatataaaatgtttcatcatactgctatactgaaacctgaatcaggctgtcttgataacatcaagtcatgggttataggtgcaatagctcttctctgcctattaggattgacctgggcctttggactcatgtatattaatgaaagcacagtcatcatggcctatctcttcaccattttcaattctctacagggaatgtttatatttattttccattgtgtcctacagaagaaggtacgaaaagagtatgggaaatgcctgcgaacacattgctgtagtggcaaaagtacagagagttccattggttcagggaaaacatctggttctcgaactcctggacgctactccacaggctcacagagccgaatccgtagaatgtggaatgacacggttcgaaagcagtcagagtcttcctttattactggagacataaacagttcagcgtcactcaacagaggagccatggctaatcatcttataagcaatgctctgcttcgtccgcatggtactaacaatccctataatacattgcttggggaaccggcggtctgtaacaacccttctgtcagcatgtacaacgcacaagagccctacagagagacaagtatgggagtaaagctaaacattgcatatcaaataggggcttctgaacaatgccagggatacaagtgtcatggatactctaccactgaatggtaaccatggcaatagttacagcattgccagcggcgaatacctgagcaactgtgtgcaaatcatagaccgtggctataaccataacgagaccgccctagagaaaaagattctgaaggaactcacttccaactatatcccttcttacctgaacaaccatgagcgctccagtgaacagaacaggaatctgatgaacaagctggtgaataaccttggcagtggaagggaagatgatgccattgtcctggatgatgccacctcgtttaaccacgaggagagtttgggcctggaactcattcatgaggaatctgatgctcctttgctgcccccaagagtatactccaccgagaaccaccagccacaccattataccagaaggcggatcccccaagaccacagtgagagctttttccctttgctaaccaacgagcacacagaagatctccagtcaccccatagagactctctctataccagcatgccgacactggctggtgtggccgccacagagagtgttaccaccagcacccagaccgaacccccaccggccaaatgtggtgatgccgaagatgtttactacaaaagcatgccaaacctaggctccagaaaccacgtccatcagctgcatacttactaccagctaggtcgcggcagcagtgatggatttatagttcctccaaacaaagatgggacccctcccgagggaagttcaaaaggaccggctcatttggtcactagtctatagaagatgacacagaaattggaaccaacaaaactgctaacaccttgttgactgttctgagttgatataagcagtggtaataatgtgt

SEQ ID NO: 7870 - DNA, 998 bp, Homo sapiens
ctgtccccgccgtgcgcccttcgccgctgagctcgcagcctccggcgcccacctccacctccagtgtcccgcctcgggccgtcgccctccagcggctcgcgagcgtgggagacgtacctgggcaggcactgtccagcccaggcccaggcacagccgtgaggggcgaggcacggggacatcctggcggccaccatggtggccacgtgcctgcaggtggtgggcttcgtcacgagcttcgtgggctggatcggggtcatcgtgaccacctccaccaatgactgggtggtgacctgcggctacaccatccccacctgccgcaagctggatgagctgggctccaaggggctgtgggccgactgcgtcatggccacggggctgtaccactgcaagcccctggtggacatcctcatcctgccgggctacgtgcaggcctgccgcgccctgatgattgctgcctcggtcctgggtctgccggccattttactgctgctgactgttcttccctgcatccggatgggccaggagcccggtgtggctaagtacaggcgggcccagctggctggtgttttgctcattctgctgggtaagacagctttctcagtggtaccctacctatgagggagcctgatgaatctcagatcttgtggttgctgccttctcaagttcaagagaaatgtgaaaggaagccaagtgaagccagtgggggatggactcccacaatctgtatccctttgtattttatgggcagtttacacagagggctaagtaatgtctctgggagtcactgaccatgaagataagtttaaaaagagaaagaggattttgaaggtaggaaatacctaagggaaagacctgaaagatggaagccttctcagtcttcacagtggaatcctttttgaacacctatgcccaggtcccacagcagatcaattgaatcagaattttctgggcatcaggccaggcaaagatattttttgaaagcttcccaggtgatgctt

SEQ ID NO: 7871 - DNA, 857 bp, Homo sapiens
ttcggggagctcggccaggctgctggtacctgcgtccgcccggcggcaggacggccatcctctccagaatgaagatcttcttgccagtgctgctggctgcccttctgggtgtggagcgagccagctcgctgatgtgcttctcctgcttgaaccagaagagcaatctgtactgcctgaagccgaccatctgctccgaccaggacaactactgcgtgactgtgtctgctagtgccggcattgggaatctcgtgacatttggccacagcctgagcaagacctgttccccggcctgccccatcccagaaggcgtcaatgttggtgtggcttccatgggcatcagctgctgccagagctttctgtgcaatttcagtgcggccgatggcgggctgcgggcaagcgtcaccctgctgggtgccgggctgctgctgagcctgctgccggccctgctgcggtttggcccctgaccgcccagaccctgtcccccgatcccccagctcaggaaggaaagcccagccctttctggatcccacagtgtatgggagcccctgactcctcacgtgcctgatctgtgcccttggtcccaggtcaggcccaccccctgcacctccacctgccccagcccctgcctctgccccaagtggggccagctgccctcacttctggggtggatgatgtgaccttccttgggggaccgcggaagggacgagggttccctggagtcttacggtccaacatcaggaccaagtcccatggacatgctgacagggtccccagggagaccgtgtcagtagggatgtgtgcctggctgtgtacgtgggtgtgcagtgcacgtgagagcacgtggcggcttctggggg

SEQ ID NO: 7872 - DNA, 744 bp, Homo sapiens
aggtccttccatagtgacgccccccaaggacatctggaatgtcactggtgcccaggtgtacttgagctgtgaggtcatcggaatcccgacacctgtcctcatctggaacaaggtaaaaaggggtcactatggagttcaaaggacagaactcctgcctggtgaccgggacaacctggccattcagacccggggtggcccagaaaagcatgaagtaactggctgggtgctggtatctcctctaagtaaggaagatgctggagaatatgagtgccatgcatccaattcccaaggacaggcttcagcatcagcaaaaattacagtggttgatgccttacatgaaataccagtgaaaaaaggtacacaataaatctcacagccatttaaaaatgactagtacatttgctttaaaaagaacagaactaagtatgaaagtatcagacgtagctattgatgaaattctgtagttagcaacccataagggcattaagtatgccattaaaatgtacagcatgagactccaaaagattatctggatgggtgactgaacatcgttattatgacttagatgcttttaccttatctaacatgtaagagtcaaaatcaaacttgcctggaatggcttctatttcccatagctttctacctatctacttggcattttccctttgtgttgtgactattaaattcctatttaaaagaaaatgattgtgggcaattctcgcccttcacttttgcttttaaaag

SEQ ID NO: 7873 - DNA, 566 bp, Homo sapiens
gacacaagagcaagcccgcacgtgtgaaggcatccactgccatgggctccccaaaggaagtcattttctcagacatcactgaaaattcggctactgtcagctggagggcacccacagcccaagtggagagcttccggattacctatgtgcccattacaggaggtacaccctccatggtaactgtggacggaaccaagactcagaccaggctggtgaaactcatacctggcgtggagtaccttgtcagcatcatcgccatgaagggctttgaggaaagtgaacctgtctcagggtcattcaccacagctctggatggcccatctggcctggtgacagccaacatcactgactcagaagccttggccaggtggcagccagccattgccactgtggacagttatgtcatctcctacacaggcgagaaagtgccagaaattacacgcacggtgtccgggaacacagtggagtatgctctgaccgacctcgagcctgccacggaatacacactgagaatctttgcagagaaagggccccagaagagctcaaccatcactgccaagttcaca

SEQ ID NO: 7874 - DNA, 690 bp, Homo sapiens
agtctgaaaaattggcacctgcaggatttgcatgtgaaaaaaacggagtcagttgcattttgccggagtctattacttatcaaatgataagaactgagcacactggatgaaataatacttgcactgggagcactaagaaaagattgatctctgggctggtgaacataatctctgtcccagtcagaaaaggagagaggaaattagcagagcgattggtggagaatgatatctgtcaaaagaaacacttggagagcactgagtttagtaataggtgactgccggaaaaaagggaactttgaatattgtcaagatcgtactgagaagcactccacaatgccagactcacctgtggatgtgaagacgcaatctaggctgactcctccaacaatgccacctcccccaactactcaaggagctccaagaaccagttcatttacaccgacaacgttaactaatggcacgagccattctcctacagccttgaatggcgccccctcaccacccaatggcttcagcaatgggccttcctcttcttcctcctcctctctggctaatcaacagctgcccccagcctgtggtgccaggcaactcagcaagctgaaaaggttccttactaccctgcagcagtttggcaatgacatttcacccgagataggagaaagagttcgcaccctcgttctgggactagtg

SEQ ID NO: 7875 - DNA, 2214 bp, Homo sapiens
aatgagaatggagaaggtccaggacacgtgggtgggggaagctgagcgctgagaccaagggctaaagctgggagactgaaaaaatgcagaccgccggggcattattcatttctccagctctggtaaggtgccgcgccgcagtgctctgtagtaccaggtgtatggtgtggacgccatcagtgtttaatgaatgaacccaggggagcttggcgtcctgatgatgtaggctctttgaggtggctgtaggatgtgatgaaggtaacccctgtttatctgggcctgtgaaccaagctatcttggctttggaatgtggtcagagagtctggatttgatttttatccccagtctgtcctggccatagagacagcccactaaaacagtggttttcaacagtggctgcacgttagaatcatccagggaactttttaaaatcctgatgcctaggctgcaccttagaccatttgcatcagactttgggaatgggggtggaacccaggcatctgtatcttttaagacttctccagatgattccaccgtgcagccaagtttgagaaccactgcactaaaaattatttcaaaaaagccatgttacagatggctctccttggatggctattccagtcggtttccggggctgactggcccactccatttagggtgtgtagctgtgagtgtattttagcagaataaaatttcccccatctgattacttggtgatctgggtataaacctttcctgtacctgctttggtattagtgtgggttcttgttccattctgagaagctgattaaagctgtgcccaaagaagtgaactttggtttggttttgaatggtgaaggttgccactgctgactatatcaagctattgagacagctgtctctggggcaggcctatctgataggaacaggaataaattgaccttgaaatacattgaacttattctgtttatgaaatctgtagtcatttttgacagctcagcaattaggattttttttccttgactgatttggtaggatgtggctttctgattttacagatccgctgttgtaccaggggtctaatcaggcctgtgtctgcctccttcttgaatagcccagtgaattcatctaaacaggtaagggaggaatagctctcttaggaatgttcccaaggcccaggatggtggctcacacctgtaatcccagctctttgagaggctgaggcgagaggatcacttgagcccagttgttcaagaccagcctgggcaacacagtgaaaccccatctctacaaaaaaaataaaaaaattagccatgtgtggtggcatgtggctgtagtcccagttactccagggctgagatgagaggattggttaatcccagaggtcgagactgctgtgactatgccactgcactccagactgggtgacagagcaagaccctgactcataaaaacccattaattaattttttttaaatcaaggaatgttcccagacaggggtccttcagcttaagttgcctttagaccaaagtgggaggagagttggagaatctgtatgctttaatagttctaagtcccccaaggtaagccttgtaggtaagaaacttataaaagtgaggtgtgcctaacccatgaaatttccctagtcctgtctgctgtctgacaacagactctaagactaattcccagcatactctgcaatcagagtattctgcatttaccaggcagtttgccaacagtttcagagctcaggtgggtggggtgaaggaggtagagtcagccacctgtccttatgccatactatctctctgctatctcgcctgccttgcttctctttctagccttcctacagcaacttcccactccaggtggccagacgggagttccagaccagtgttgtctcccgggacattgacacagcagccaagtttattggtgctggggcagccacagttggtgtggctggttcaggggctggcattggaaccgtgtttggcagcttgatcattggctatgccaggaacccgtctctcaagcagcagctcttctcctatgccattcttggctttgccctgtctgaggccatggggcttttctgtttgatggtcgccttcctcatcctcttcgccatgtgaggctccatgggggggtcaccggcctgttgctactgcaactccacaccattcttggtgctggggtgtgttaagctttaccattaaacacaacgtttctct

SEQ ID NO: 7876 - DNA, 661 bp, Homo sapiens
gtgagaaggccggggaggcaggccctgctgtcttcctgcaggccggcagcctgctggcagtggaggaccaggccgtccaggaaaggaaggggtcaggaggtcgggcagggcctcagcagctgttagccgagcaagcatgaagaatcgagaggaaagatcccagcattttttcgacacatcagtaccactaatggatgatggagacgataacactctttaccatcggggttttacagaggaccagttagttctggtggagcagaacacactgatggtggaagagcgggaacgagagattcgccagattgtacagtccatttctgacctgaatgaaatattcagggacttaggggcgatgattgtagaacagggtacagtccttgacagaattgactataacgttgaacagtcctgtatcaaaactgaagatggtttgaaacagcttcacaaggcagaacagtatcaaaagaagaatcggaagatgcttgtgattttaatattatttgtcatcatcattgtgctcattgttgtcctcgttggcgtgaagtctcgataagtggcattgggttttcgtgtgtgccgcgcgtgtggatctcccgggtgtgaggggcttggcctgcgccccgccagctgcccgcagaggtgcagcctcgaggaatct

SEQ ID NO: 7877 - DNA, 2276 bp, Homo sapiens
ggaaaaaaggaaagtgcacttggaagagatccaagtgggcaacttgaagaacaagtgccaaatagcacttctgtcatgctggatgtcagggctctttgtccactttgtatagccgctggcttatagaaggtgctcgataaatctcttgaatttaaaaatcaattaggatgcctctatagtgaaaaagatacagtaaagatgagggataatcaatttaaaaaatgagtaagtacacacaaagcactttatccattcttatgacacctgttacttttttgctgtgtttgtgtgtatgcatgccatgttatagtttgtgggaccctcaaagcaagctggggagagtatatactgaatttagcttctgagacatgatgctcttcctttttaattaacccagaacttagcagcttatctatttctctaatctcaaaacatccttaaactgggggtgatacttgagtgagagaattttgcaggtattaaatgaactatcttcttttttttttttctttgagacagagtcttgctctgtcacccaggctggagtgcagtggcgtgatctcagctcactgcaacctccgcctcccgggttcaagtgattctcctgcctcagcctcctgagtagctgggattacaggtgcgtgccaccgtgcccagctaatttttgtgtttttagtagagacggggtttcaccatgttggccatgctggtcttgaactcctgacctcgtgatctgcccacctcggcctcccaaagtgctggaattataggcgtgagccaccgcgcccagcaaagaacttctaaccttcataacctgacaggtgttctcgaggccagggtctctctttctgtcctttcacgatgctctgcatcccttggatgtgccagtttctgggggaagagtagtcctttgttacatgcatgagtcagtgaacagggaatgggtgaatgacatttgtgggtaggttatttctagaagttaggtgggcagcttggaaggcagaggcacttctacagactattccttggggccacacgtaggttcttgaatcccgaatggaaaggggagattgataactggtgtgtttatgttcttacaagtcttctgccttttaaaatccagtcccaggacatcaaagctctgcagaaagaactcgagcaatttgccaagctcctgaagcagaagaggatcaccctgggatatacacaggccgatgtggggctcaccctgggggttctatttggtgggttcccctctgcagattctgaccgcatctcccctctaaggagtatccctgaacctagtggggaggggcaggggcagactaccctcacccatgaagaggagtagggagagggagaagatgctttgagctccctctgggaagaggtggtaagcttggatctcagggtcacaagggccctgcgtgctccctcactttgcttctcttttgactggcctcccccagggaaggtattcagccaaacgaccatctgccgctttgaggctctgcagcttagcttcaagaacatgtgtaagctgcggcccttgctgcagaagtgggtggaggaagctgacaacaatgaaaatcttcaggagatatgcaaagcagaaaccctcgtgcaggcccgaaagagaaagcgaaccagtatcgagaaccgagtgagaggcaacctggagaatttgttcctgcagtgcccgaaacccacactgcagcagatcagccacatcgcccagcagcttgggctcgagaaggatgtggtccgagtgtggttctgtaaccggcgccagaagggcaagcgatcaagcagcgactatgcacaacgagaggattttgaggctgctgggtctcctttctcagggggaccagtgtcctttcctctggccccagggccccattttggtaccccaggctatgggagccctcacttcactgcactgtactcctcggtccctttccctgagggggaagcctttccccctgtctccgtcaccactctgggctctcccatgcattcaaactgaggtgcctgcccttctaggaatgggggacagggggaggggaggagctagggaaagaaaacctggagtttgtgccagggtttttgggattaagttcttcattcactaaggaaggaattgggaacacaaagggtgggggcaggggagtttggggcaactggttggagggaaggtgaagttcaatgatgctcttgattttaatcccacatcatgtatcacttttttcttaaataaagaagcctgggacacagta

SEQ ID NO: 7878 - DNA, 868 bp, Homo sapiens
caggctgctggtacctgcgtccgcccggcggcctccccgaatgtttccaaagatctggggcgggagcgggcggagactgccgccaggagcctcccggccgccccagggctgcgcagccactggagcccatcacccaactccagacgctcctggctcctctacgtgggccgggagggacagccttgaggactaggggagggggcacgggaccttgcagagctcctggccggaaagggaggattgaccgcccccggcatatcaccccggagcactggaacccgcccccgcttcttgttttggcactggtggtgcttgcggacaggctgctttggtttgtgacctccaggcaggacggccatcctctccagaatgaagatcttcttgccagtgctgctggctgcccttctgggtgtggagcgagccagctcgctgatgtgcttctcctgcttgaaccagaagagcaatctgtactgcctgaagccgaccatctgctccgaccaggacaactactgcgtgactgtgtctgctagtgccggcattgggaatctcgtgacatttggccacagcctgagcaagacctgttccccggcctgccccatcccagaaggcgtcaatgttggtgtggcttccatgggcatcagctgctgccagagctttctgtgcaatttcagtgcggccgatggcgggctgcgggcaagcgtcaccctgctgggtgccgggctgctgctgagcctgctgccggccctgctgcggtttggcccctgaccgcccagaccctgtcccccgatcccccagctcaggaaggaaagcccagccctttctggatcccacagtgtatgggagcccctgactcctcacgtgcctgatc

SEQ ID NO: 7879 - DNA, 2271 bp, Homo sapiens; identical to SEQ ID NO: 5897

SEQ ID NO: 7880 - DNA, 527 bp, Homo sapiens
gacctacagcgggcgcggcgccggcggtctgcggccggcggtgtagacgccccttcgccgggacctggcacccgaatccggcctgccggtgttacctggaatgtcagagagctgaaagcagtcatattttgggatcatgcacctactgcggcagtatataaagaaagataattaagtatgcacccaagaagtagctgcgcccctacccatcacaaactgtatagaaggatatctcctaaggattttatcatgtgaaaactttctgaattttagttggctctttttagaaatgcagataagatgaaggatattggacagcagctatacactacacacttgaacggcggacataattccttgaccatgtcacccaaacagcctgatgctaatggagcacctcggccaaatagacaagaagcacaaacccttttgtatcaaggctcagaggcagaggctgccatgatgaccattgctacatgtgcaaagtgcaaaagtgttcacaagatctctcttcaagatttgcagaa

SEQ ID NO: 7881 - DNA, 475 bp, Homo sapiens
gctcctggctggttctcttcagagacaggacaggaacgagagccaggctctggtccggccgtgtgcgagttcttcagcgttgccctccacatctggagtaacatattggagagaaagaaactgccccagaagagcctggctcacctgcaaagtctgcacctgcttctccagtgcagagcccagcgaaggaggcagagacaaagagccctttagtctctccttccaagtctttagaggaaggtactaagaagacagaaacaagcaaagccgccaccacagagcccgaaacaacccagccggaaggggtggtggtcaacgggagggaggaggagcagacggcagaggaaatcctcagcaaaggcctgagccagatgaccaccagtgctgacacggatgttgatacctctaaggacaaaaccgagtcggtcaccagcggccccatgtccccagagggctcaccttccaagtctccctc

SEQ ID NO: 7882 - DNA, 3807 bp, Homo sapiens
atggcgagcgactccccggctcgaagcctggatgaaatagatctctcggctctgagggaccccgcagggatctttgaattggtggaacttgttggaaatggaacatacgggcaagtttataagggtcgtcatgtcaaaacgggccagcttgcagccatcaaggttatggatgtcacaggggatgaagaggaagaaatcaaacaagaaattaacatgttgaagaaatattctcatcaccggaatattgctacatactatggtgcttttatcaaaaagaacccaccaggcatggatgaccaactttggttggtgatggagttttgtggtgctggctctgtcaccgacctgatcaagaacacaaaaggtaacacgttgaaagaggagtggattgcatacatctgcagggaaatcttacgggggctgagtcacctgcaccagcataaagtgattcatcgagatattaaagggcaaaatgtcttgctgactgaaaatgcagaagttaaactagtggactttggagtcagtgctcagcttgatcgaacagtgggcaggaggaatactttcattggaactccctactggatggcaccagaagttattgcctgtgatgaaaacccagatgccacatatgatttcaagagtgacttgtggtctttgggtatcaccgccattgaaatggcagaaggtgctccccctctctgtgacatgcaccccatgagagctctcttcctcatcccccggaacccagcgcctcggctgaagtctaagaagtggtcaaaaaaattccagtcatttattgagagctgcttggtaaagaatcacagccagcgaccagcaacagaacaattgatgaagcatccatttatacgagaccaacctaatgagcgacaggtccgcattcaactcaaggaccatattgatagaacaaagaagaagcgaggagaaaaagatgagacagagtatgagtacagtggaagtgaggaagaagaggaggagaatgactcaggagagcccagctccatcctgaatctgccaggggagtcgacgctgcggagggactttctgaggctgcagctggccaacaaggagcgttctgaggccctacggaggcagcagctggagcagcagcagcgggagaatgaggagcacaagcggcagctgctggccgagcgtcagaagcgcatcgaggagcagaaagagcagaggcggcggctggaggagcaacaaaggcgagagaaggagctgcggaagcagcaggagagggagcagcgccggcactatgaggagcagatgcgccgggaggaggagaggaggcgtgcggagcatgaacaggaatataagcgcaaacaattggaagaacagagacaagcagaaagactgcagaggcagctaaagcaagaaagagactacttagtttcccttcagcatcagcggcaggagcagaggcctgtggagaagaagccactgtaccattacaaagaaggaatgagtcctagtgagaagccagcatgggccaaggagatcccacatctggtagctgtaaaatcccagggacctgccttgaccgcctcccagtcagtgcacgagcagcccacaaagggcctctctgggtttcaggaggctctgaacgtgacctcccaccgcgtggagatgccacgccagaactcagatcccacctcggaaaatcctcctctccccactcgcattgaaaagtttgaccgaagctcttggttacgacaggaagaagacattccaccaaaggtgcctcaaagaacaacttctatatccccagcattagccagaaagaattctcctgggaatggtagtgctctgggacccagactaggatctcaacccatcagagcaagcaaccctgatctccggagaactgagcccatcttggagagccccttgcagaggaccagcagtggcagttcctccagctccagcacccctagctcccagcccagctcccaaggaggctcccagcctggatcacaagcaggatccagtgaacgcaccagagttcgagccaacagtaagtcagaaggatcacctgtgctcccccatgagcctgcgaaggtgaaaccagaagaatccagggacattacccggcccagtcgaccagctgatctgacggcattagccaaagaactaagagaactccggattgaagaaacaaaccgcccaatgaagaaggtgactgattactcctcctccagtgaggagtcagaaagtagcgaggaagaggaggaagatggagagagcgagacccatgatgggacagtggctgtcagcgacatacccagactgataccaacaggagctccaggcagcaacgagcagtacaatgtgggaatggtggggacgcatgggctggagacctctcatgcggacagtttcagcggcagtatttcaagagaaggaaccttgatgattagagagacgtctggagagaagaagcgatctggccacagtgacagcaatggctttgctggccacatcaacctccctgacctggtgcagcagagccattctccagctggaaccccgactgagggactggggcgcgtctcaacccattcccaggagatggactctgggactgaatatggcatggggagcagcaccaaagcctccttcaccccctttgtggaccccagagtataccagacgtctcccactgatgaagatgaagaggatgaggaatcatcagccgcagctctgtttactagcgaacttcttaggcaagaacaggccaaactcaatgaagcaagaaagatttcggtggtaaatgtaaacccaaccaacattcggcctcatagcgacacaccagaaatcagaaaatacaagaaacgattcaactcagaaatactttgtgcagctctgtggggtgtaaaccttctggtggggactgaaaatggcctgatgcttttggaccgaagtgggcaaggcaaagtctataatctgatcaaccggaggcgatttcagcagatggatgtgctagagggactgaatgtccttgtgacaatttcaggaaagaagaataagctacgagtttactatctttcatggttaagaaacagaatactacataatgacccagaagtagaaaagaaacaaggctggatcactgttggggacttggaaggctgtatacattataaagttgttaaatatgaaaggatcaaatttttggtgattgccttaaagaatgctgtggaaatatatgcttgggctcctaaaccgtatcataaattcatggcatttaagtcttttgcagatctccagcacaagcctctgctagttgatctcacggtagaagaaggtcaaagattaaaggttatttttggttcacacactggtttccatgtaattgatgttgattcaggaaactcttatgatatctacataccatctcatattcagggcaatatcactcctcatgctattgtcatcttgcctaaaacagatggaatggaaatgcttgtttgctatgaggatgagggggtgtatgtaaacacctatggccggataactaaggatgtggtgctccaatggggagaaatgcccacgtctgtggcctacattcattccaatcagataatgggctggggcgagaaagctattgagatccggtcagtggaaacaggacatttggatggagtatttatgcataagcgagctcaaaggttaaagtttctatgtgaaagaaatgataaggtattttttgcatccgtgcgatctggaggaagtagccaagtgtttttcatgaccctcaacagaaattccatgatgaactggtaa

SEQ ID NO: 7883 - DNA, 2736 bp, Homo sapiens
agtacagcagcaatcataagaggggaaaagccatcactgtggcttgggcaggagtcccagaatactggggcacaatttctaatcccacatattttcccattaactctgggggtgaccagcttcacctttccaaaacaaaatgagaacccaatgtttgtatatatgtgtacatacacatatgtacacatatatattcaggactgaacagtctcagtctagctattggttttgaaaaagtttaaattgatttcatctttcttttctagcttctacacgctacaaacatcattttcttagttccatgcagtaactatgtttgtcacagttctatatagagcttttttttttcttgttgcttaagctggagcactgacttgctgagagatgtagctttggtcgtatctaccactcatatgctgaacaaatttttctttcataggatctgacggcattagccaaagaactaagagaactccggattgaagaaacaaaccgcccaatgaagaaggtgactgattactcctcctccagtgaggagtcagaaagtagcgaggaagaggaggaagatggagagagcgagacccatgatgggacagtggctgtcagcgacatacccagactgataccaacaggagctccaggcagcaacgagcagtacaatgtgggaatggtggggacgcatgggctggagacctctcatgcggacagtttcagcggcagtatttcaagagaaggaaccttgatgattagagagacgtctggagagaagaagcgatctggccacagtgacagcaatggctttgctggccacatcaacctccctgacctggtgcagcagagccattctccagctggaaccccgactgagggactggggcgcgtctcaacccattcccaggagatggactctgggactgaatatggcatggggagcagcaccaaagcctccttcaccccctttgtggaccccagagtataccagacgtctcccactgatgaagatgaagaggatgaggaatcatcagccgcagctctgtttactagcgaacttcttaggcaagaacaggccaaactcaatgaagcaagaaagatttcggtggtaaatgtaaacccaaccaacattcggcctcatagcgacacaccagaaatcagaaaatacaagaaacgattcaactcagaaatactttgtgcagctctgtggggtgtaaaccttctggtggggactgaaaatggcctgatgcttttggaccgaagtgggcaaggcaaagtctataatctgatcaaccggaggcgatttcagcagatggatgtgctagagggactgaatgtccttgtgacaatttcaggaaagaagaataagctacgagtttactatctttcatggttaagaaacagaatactacataatgacccagaagtagaaaagaaacaaggctggatcactgttggggacttggaaggctgtatacattataaagttgttaaatatgaaaggatcaaatttttggtgattgccttaaagaatgctgtggaaatatatgcttgggctcctaaaccgtatcataaattcatggcatttaagtcttttgcagatctccagcacaagcctctgctagttgatctcacggtagaagaaggtcaaagattaaaggttatttttggttcacacactggtttccatgtaattgatgttgattcaggaaactcttatgatatctacataccatctcatattcagggcaatatcactcctcatgctattgtcatcttgcctaaaacagatggaatggaaatgcttgtttgctatgaggatgagggggtgtatgtaaacacctatggccggataactaaggatgtggtgctccaatggggagaaatgcccacgtctgtggcctacattcattccaatcagataatgggctggggcgagaaagctattgagatccggtcagtggaaacaggacatttggatggagtatttatgcataagcgagctcaaaggttaaagtttctatgtgaaagaaatgataaggtattttttgcatccgtgcgatctggaggaagtagccaagtgtttttcatgaccctcaacagaaattccatgatgaactggtaacagaagagcacttggcacttatcttcatggcgttatttctaatttaaaagaacataactcatgtggacttatgccagtctagaggcagaatcagaaggcttggttgaacatatcgctttccctttttcctctccctccgcccctcccagtacagtccatctttcaatgttgcagcctggttgagaaggagagaaaaaggtggcaggaatttccaggagatccccaagaatgctgccttgtctgtggacaaagatggaccatgtgcccttcggaattagggatagaaacaaatattgtgtgctcttaacgattaagctgtgttatggtgggttttcaggtttttaccttttttctttacccctttactctgcaagaatggggaaagaatgcatactgcgaaaatgagtcttttaaattctgtctgcctactagttttaagtatatggtatgttgtaaaatttccaatgatgagagacagcacaataaatgtaccttatctccttaggctgaaggccataactacatagtggagtaatttaagaactctcttgccttcaccaacccaaaaggttgctttttgatagcaactggctaatgaatttttaaaaagagaagaaaaa

SEQ ID NO: 7884 - DNA, 1071 bp, Homo sapiens
gcaattgacttccattttattgtcttttagtcctgttggcagtaaatgaatggcttgagtgagtgttgagcagtttaatctgcaccttcagggagacagttcttttagtaactccacctgatgccttgcagtgtcaagggaggctcagctttgttctgacagcattatagtggagacttgggctttcttttggtggaattattctgcagccagttgtacaaataaatgagtaacctatctgaaacaagctagaaattgatgtctcagatgcctccatgatgttaggaatccatgttttatcctctagctccatcatccacatgactttcatttccatgtgtttctctaggcctatgatagcttctctagctatcatactccaatcagcaaaaaatgagaaaatgttgagaaatagaagataattcctcatttaaggccaccttctagaatttgtgcttaagattctgttttcttctcatgggccagcacttcggcaactggcaaaaattaggtgtacagggatctaggtaatactgtttatttgagcaataatatattgtgctaacgttcaggcatcctattactgagaaataagggaaaatgagtgtaaagtacaactaagagtctcggctacagggaaaaataccatcagttaaatatccatagtcctagagcatttatgtaaaactgcaatttgaatcctgcaatacattttggctttttcctcagtgataccatgtgtgggaagttgttctgtcaaggtgggtcggataatttgccctggaaaggacggatagtgactttcctgacatgtaaaacatttgatcctgaagacacaagtcaagaaataggcatggtggccaatggaactaagtgtggcgataacaaggtttgcattaatgcagaatgtgtggatattgagaaagcctacaaatcaaccaattgctcatctaagtgcaaaggacatgctgtgtgtgaccatgagctccagtgtcaatgtgaggaaggatggatccctcccgactgcgatgactcctcagtggtcttccacttctccattgtggttggggt

SEQ ID NO: 7885 - DNA, 2096 bp, Homo sapiens
cttctgagtgggggcggggactgctggagttgcggggcctgcctggggtagggcggggcaggacagcttggagatagggcccggaattgcgggcgtcactctgctcctgcgacctagccaggcgtgagggagtgacagcagcgcattcgcgggacgagagcgatgagtgagaacgccgcaccaggtctgatctcagagctgaagctggctgtgccctggggccacatcgcagccaaagcctggggctccctgcagggccctccagttctctgcctgcacggctggctggacaatgccagctccttcgacagactcatccctcttctcccgcaagacttttattacgttgccatggatttcggaggtcatgggctctcgtcccattacagcccaggtgtcccatattacctccagacttttgtgagtgagatccgaagagttgtggcagccttgaaatggaatcgattctccattctgggccacagcttcggtggcgtcgtgggcggaatgtttttctgtaccttccccgagatggtggataaacttatcttgctggacacgccgctctttctcctggaatcagatgaaatggagaacttgctgacctacaagcggagagccatagagcacgtgctgcaggtagaggcctcccaggagccctcgcacgtgttcagcctgaagcagctgctgcagaggttactgaagagcaatagccacttgagtgaggagtgcggggagcttctcctgcaaagaggaaccacgaaggtggccacaggcagagaacagcattgacttcatcagcagggagctgtgtgcgcattccatcaggaagctgcaggcccatgtcctgttgatcaagtaagtctggacccatccccttcagccacccgccaaggagacatgggcgccaggaatctccgggagggggccctggcatgaggctccaagttctctgcgtgtcgaccacatcgctaaggctcaagatcttttttgggaagcccccctggcagcagggtcatggaaggaggaaggtcagaggaggggagggctcgggcagcaggggatgggccggggctgtcccatgcctttccacaggtgtcagcggggggcatgcccaggtaaggctccataaccagtgagcccagtctcggctgactgcaacctctgtctcctggattcaaacgattctcctgcctcagcctcccgagtagctgggactacaggcgcccgccaccaggcctggcttatttttgtatttttagtagagacgaggtttcgccatgttggccaggctgctctccatctcctgacctcatgatccgcccgcctcggcctcccagtgttgggattacaggcgtgagccaccgtgcgtggcccaccatagacgatttttaagccataaaaagaaacgaagcactgacacgggctccagcatggatgagcctttaaaacatcgcgctaagtggacgaattcagacacaaccgtctacgtgttgtatggctgcattcacgttcaagtcaagtccaaatagggcacactgcagagacaaagccagagcagtccacggatattttgattcaagacagaattactctgagaaggagtccctgtcgttcatgatagacacgatgaaatccaccctcaaagagcagttccagtttgtggaagtcccaggcaatcactgtgtccacatgagcgaaccccagcacgtggccagtatcatcagctccttcttacagtgcacacacatgctcccagcccagctgtagctctgggcctggaactatgaagacctagtgctcccagactcaacactgggactctgagttcctgagccccacaacaaggccagggatggtggggacaggcctcactagtcttgaggcccagcctaggatggtagtcaggggaaggagcgagattccaacttcaacatctgtgacctcaagggggagacagagtctgggttccagggctgctttctcctggctaataataaatatccagccagctggaggaaggaagggcaggctgggcccacctagcctttccctgctgcccaactggatggaaaataaaaggttcttgtattctc

SEQ ID NO: 7886 - DNA, 728 bp, Homo sapiens
agaagcaaggcggctaaaaactcatgaatgactcagcaggacttagttaaaaaatgcttctttcaggtttctcgttgcttacacaaagaaagccccccagctgacctcgtcggagctgatggccatcaccagaaaaatggcagccacagcagccacttgttgccaactcagtgaggacaaactattggcctgtggcgagggagcggctgacattattatcggacacttatgtatcagacatgaaatgactccagtaaaccctggtgttggccagtgctgcacttcttcatatgccaacaggaggccatgcttcagcagcttggtggtggatgaaacatatgtccctcctgcattctctgatgacaagttcattttccataaggatctgtgccaagctcagggtgtagcgctgcaaacaatgaagcaagagtttctcattaaccttgtgaagcaaaagccacaaataacagaggaacaacttgaggctgtcattgcagatttctcaggcctgttggagaaatgctgccaaggccaggaacaggaagtctgctttgctgaagagggacaaaaactgatttcaaaaactcgtgctgctttgggagtttaaattacttcaggggaagagaagacaaaacgagtctttcattcggtgtgaacttttctctttaattttaactgatttaacactttttgtgaattaatgaaatgataaagacttttatgtgaga

SEQ ID NO: 7887 - DNA, 558 bp, Homo sapiens
gaggctgcccggaggaggcagcggcggcggcagcgcgtcctcggtccccaggaccacggcttctttcctgccagagcgactctaccttggaaaccagggattccccttcccgtcgcccgccccatttgatatatgggcctgaaatgtatgccatcccatcaccatcggactggactgttcacagcactggagagacagaggtccttcattcactccaggtcacaggctatctatccatctggccatccatccgtgggggtctgcaatggccacctttagccgccaggaatttttccagcagctactgcaaggctgtctcctgcctactgcccagcagggccttgaccagatctggctgctccttgccatctgcctcgcctgccgcctcctctggaggctcgggttgccatcctacctgaagcatgcaagcaccgtggcaggcgggttcttcagcctctaccacttcttccagctgcacatggtttgggtcgtgctgctcagcctcctgtgctacctcgtgctgttcctctgccgacattcctcccatcgaggcgtctt

SEQ ID NO: 7888 - DNA, 846 bp, Homo sapiens
gttttaatctagcattgaaccagcctaaaaacaactttaagtgtaaatgcttcaggttgttttgatgctgagataccatgaatatatgattgataaatagtaatgtgctaagatcggcactgggaagcaactctccctgcctgcttaacataagctttcactgtcaaataagtgagaaaatgaatattagagttgatactatggacttctatttttctattcagagaagatccattagacttatgtatgcatgtctgtgtgtgtgtgtgtgcgcgcgcgtgtgcgtgtgtgtgatctgaggtttacattcttttaaaggattttatctttccctttgtagagtcagcgtgggagaaattgtaacgagaaaccaacaaatgtcaggaaaagaaaattcattaacagagatctggctcatgattcagaagaactctttcaagatctaagtcaattacaggaaacatggcttgcagaagctcaggtacctgacaatgatgagcagtttgtaccagactatcaggctgaaagtttggcttttcatggcctgccactgaaaatcaagaaagaaccccacagtccatgttcagaaatcagctctgcctgcagtcaagaacagccctttaaattcagctatggagaaaagtgcctgtacaatgtcagtgcctatgatcagaagccacaagtgggaatgaggccctccaacccccccacaccatccagcacgccagtgtccccactgcatcatgcatctccaaactcaactcatacaccgaaacctgaccgggccttcccagctcacctccctccatcgcagtccataccagatagcagctaccccatggacca

SEQ ID NO: 7889 - DNA, 5393 bp, Homo sapiens
ttttgctctctgggattggtttcttaaagaatctggatcctttttaatatgtcaaaatgagtctgctgatgtttacacaactactgctctgtggatttttatatgttcgggttgatggatcgcgtcttcgccaggaggactttcccccgcggattgtggagcatccttccgatgtcatcgtctctaagggcgagcccacgactctgaactgcaaggcggagggccggccaacgcccaccattgagtggtacaaagatggggagcgagtggagactgacaaggacgatccccggtcccacaggatgcttctgcccagcggatccttattcttcttgcgcatcgtgcacgggcgcaggagtaaacctgatgaaggaagctacgtttgtgttgcgaggaactatcttggtgaagcagtgagtcgaaatgcgtctctggaagtggcattgttacgagatgacttccgacaaaaccccacagatgttgtagtggcagctggagagcctgcaatcctggagtgccagcctccccggggacacccagaacccaccatctactggaaaaaagacaaagttcgaattgatgacaaggaagaaagaataagtatccgtggtggaaaactgatgatctccaataccaggaaaagtgatgcagggatgtatacttgtgttggtaccaatatggtgggagaaagggacagtgacccagcagagctgactgtctttgaacgacccacatttctcaggaggccaattaaccaggtggtactggaggaagaagctgtagaatttcgttgtcaagtccaaggagatcctcaaccaactgtgaggtggaaaaaggatgatgcagacttgccaagaggaaggtatgacatcaaagacgattacacactaagaattaaaaagaccatgagtacagatgaaggcacctatatgtgtattgctgagaatcgggttggaaaaatggaagcctctgctacactcaccgtccgagctcccccacagtttgtggttcggccaagagatcagattgttgctcaaggtcgaacagtgacatttccctgtgaaactaaaggaaacccacagccagctgttttttggcagaaagaaggcagccagaacctacttttcccaaaccaaccccagcagcccaacagtagatgctcagtgtcaccaactggagacctcacaatcaccaacattcaacgttccgacgcgggttactacatctgccaggctttaactgtggcaggaagcattttagcaaaagctcaactggaggttactgatgttttgacagatagacctccacctataattctacaaggcccagccaaccaaacgctggcagtggatggtacagcgttactgaaatgtaaagccactggtgatcctcttcctgtaattagctggttaaaggagggatttacttttccgggtagagatccaagagcaacaattcaagagcaaggcacactgcagattaagaatttacggatttctgatactggcacttatacttgtgtggctacaagttcaagtggagagacttcctggagtgcagtgctggatgtgacagagtctggagcaacaatcagtaaaaactatgatttaagtgacctgccagggccaccatccaaaccgcaggtcactgatgttactaagaacagtgtcaccttgtcctggcagccaggtacccctggaacccttccagcaagtgcatatatcattgaggctttcagatatgtagtttagaaggctcagttataatattgcatgtggaaatgatgcaaaagaaaacacaccttgtaacaggaaaatgtattggcataatttactctgtagtccatttattctttctacaggttaattcttttcaagccaatcagtgagcaacagctggcagaccgtggcaaaccatgtaaagaccaccctctatactgtaagaggactgcggcccaatacaatctacttattcatggtcagagcgatcaacccccaaggtctcagtgacccaagtcccatgtcagatcctgtgcgcacacaagatatcagcccaccagcacaaggagtggaccacaggcaagtgcagaaagagctaggagatgtccttgtccgtcttcataatccagttgtgctgactcccaccacggttcaggtcacatggacggttgatcgccaaccccagtttatccaaggctaccgagtgatgtatcgtcagacttcaggtctgcaggcgacatcttcgtggcagaatttagatgccaaagtcccgactgaacgaagtgctgtcttagtcaacctgaaaaagggggtgacttatgaaattaaagtacggccatattttaatgagttccaaggaatggatagtgaatctaaaacggttcgtactactgaagaagccccaagtgccccaccacagtctgtcactgtactgacagttggaagctacaatagcacaagtattagtgtttcctgggatcctcctcctccagatcaccagaatggaattatccaagaatacaagatctggtgtctaggaaatgaaacgcgattccatatcaacaaaactgtggatgcagccattcggtccgtaataattggtggattattcccaggtattcaataccgggtagaggttgcagctagtaccagtgcaggggttggagtaaagagtgagccacagccaataataatcgggagacgcaatgaagttgtcattactgaaaacaataacagcataactgagcaaatcactgatgtggtgaagcaaccagcctttatagctggtattggtggtgcctgctgggtaattctgatgggttttagcatatggttgtattggcgaagaaagaagaggaagggactcagtaattatgctgttacgtttcaaagaggagatggaggactaatgagcaatggaagccgtccaggtcttctcaatgctggtgatcccagctatccatggcttgctgattcttggccagccacgagcttgccagtaaataatagcaacagtggcccaaatgagattggaaattttggccgtggagatgtgctgccaccagttccaggccaaggggataaaacagcaacgatgctctcagatggagccatttatagtagcattgacttcactaccaaaaccagttacaacagttccagccaaataacacaggctaccccatatgccacgacacagatcttgcattccaacagcatacatgaattggctgtcgatctgcctgatccacaatggaaaagctcaattcagcaaaaaacagatctgatgggatttggttattctctacctgatcagaacaaaggtaacaatggtgggaaaggtggaaaaaagaagaaaaataaaaactcttctaaaccacagaaaaacaatggatccacttgggccaatgtccctctacctccccccccagtccagccccttcctggcacggagctggaacactatgcagtggaacaacaagaaaatggctatgacagtgatagctggtgcccaccattgccagtacaaacttacttacaccaaggtctggaagatgaactggaagaagatgatgatagggtcccaacacctcctgttcgaggcgtggcttcttctcctgctatctcctttggacagcagtccactgcaactcttactccatccccacgggaagagatgcaacccatgctgcaggctcacctggatgagttgacaagagcctatcagtttgatatagcaaaacaaacatggcacattcaaagcaataatcaacctccacagcctccagttccaccgttaggttatgtgtctggagccttgatttctgatttggaaacggatgttgcagatgatgatgccgacgacgaagaggaagctttagaaatccccaggcccctgagagcactggaccagactcctggatccagcatggacaatctagacagctctgtgacaggaaaagcctttacctcctctcaaagacctcgacctaccagcccattttctactgacagtaacaccagtgcagccctgagtcaaagtcagaggcctcggcccactaaaaaacacaagggagggcggatggaccaacaaccagcattgcctcatcgaagggaaggaatgacagatgaggaggccttggtgccctatagcaagcccagtttcccatctccaggtggccacagctcatcaggaacagcttcttctaagggatccactggacctaggaaaaccgaggtgttgagagcaggccaccagcgcaatgccagcgaccttcttgacataggatatatgggctccaacagtcaaggacagtttacaggtgaattatagtaaatgagaggagacatacaaagctgctctgaaggaccatcaggtccggactcatggaagtgatgactctaaacagtgcaatgaacaatttatttatgtactattaaaagaactgtaaatgcaatgtaaagacacacagccacacatatcccacagatattttcattgtgttcttctcttaagtacaccacccaccttaactctttcttgtcaggagtatataaaaaagaaagaaaacaaaactcgccctacaggaagaaaaggattctcctctgtatataatttcttttgtgcattgctatgcaagctcactctttttagctctgctcatattattgtctgttcttattggtctgttgtactatatgtgaattaataggctgtggtgccatatattaacttttaattgtgtaacttttatgtttaaattttgcactgcaattttatttggtgataagcacaaatctctactcctcatgacatgaagaaaaagactgaatgtgaagggagtttctgtactgtaagctagattggataatgatggctgtaacaaatcatgttagatggttttcagttggggtgtagaaataggaagatgcaaaggaacaatggtgttggcaaagtcttctttgaatatcagggactgagtcaataaaaaaaatagtagaaaggtggcttttactattgacaaaagccggggtcaaaaaaagtagtttaagtcttaagactgaatatgcattaaagtatgcaggtagcaaagatgtaataaatttgcttaaaaaaagaaattaaagttttatttagaatcaattttacctgtcattgtaattgacccatctgagaattacaataagcaagaggaaattaaggtgttttgcaagagctgtatttatattacagttttttaaaaacattttctgaattatcgtaattaagctctccaactcgttaagtcagaatataatatgaagttccccaaggaaacgaacaaaatgaactctagaatatctagcaaatagttaaagaagcaatttattattagggcatactcgggctgtttc

SEQ ID NO: 7890 - DNA, 6013 bp, Homo sapiens
aattctaggggctgccatggcttggctaagcttcccttgaccactgagcatttctaagggagttgaggctggtggctcctccttccttcctactggtgcttccacctgccttggtctgagttgcagtccatggggcagcgcctaagtgtctgagcacacttaagaatctctagtggtttatgacccagactttgccctaccacctcagtcttctgaatgttctcttccctggaccctgctccagacactttaaattcagaagaggaaaatgtgcccagcctgcctggagaaaagtgtctgctcctagccaagatctcctcatcacaaaagtaatgtgggccatggagtcaggccacctcctctgggctctgctgttcatgcagtccttgtggcctcaactgactgatggagccactcgagtctactacctgggcatccgggatgtgcagtggaactatgctcccaagggaagaaatgtcatcacgaaccagcctctggacagtgacatagtggcttccagcttcttaaagtctgacaagaaccggatagggggaacctacaagaagaccatctataaagaatacaaggatgactcatacacagatgaagtggcccagcctgcctggttgggcttcctggggccagtgttgcaggctgaagtgggggatgtcattcttattcacctgaagaattttgccactcgtccctataccatccaccctcatggtgtcttctacgagaaggactctgaaggttccctatacccagatggctcctctgggccactgaaagctgatgactctgttcccccggggggcagccatatctacaactggaccattccagaaggccatgcacccaccgatgctgacccagcgtgcctcacctggatctaccattctcatgtagatgctccacgagacattgcaactggcctaattgggcctctcatcacctgtaaaagaggagccctggatgggaactcccctcctcaacgccaggatgtagaccatgatttcttcctcctcttcagtgtggtagatgagaacctcagctggcatctcaatgagaacattgccacttactgctcagatcctgcttcagtggacaaagaagatgagacatttcaggagagcaataggatgcatgcaatcaatggctttgtttttgggaatttacctgagctgaacatgtgtgcacagaaacgtgtggcctggcacttgtttggcatgggcaatgaaattgatgtccacacagcatttttccatggacagatgctgactacccgtggacaccacactgatgtggctaacatctttccagccacctttgtgactgctgagatggtgccctgggaacctggtacctggttaattagctgccaagtgaacagtcactttcgagatggcatgcaggcactctacaaggtcaagtcttgctccatggcccctcctgtggacctgctcacaggcaaagttcgacagtacttcattgaggcccatgagattcaatgggactatggcccgatggggcatgatgggagtactgggaagaatttgagagagccaggcagtatctcagataagtttttccagaagagctccagccgaattgggggcacttactggaaagtgcgatatgaagcctttcaagatgagacattccaagagaagatgcatttggaggaagataggcatcttggaatcctggggccagtgatccgggctgaggtgggtgacaccattcaggtggtcttctacaaccgtgcctcccagccattcagcatgcagccccatggggtcttttatgagaaagactatgaaggcactgtgtacaatgatggctcatcttaccctggcttggttgccaagccctttgagaaagtaacataccgctggacagtcccccctcatgccggtcccactgctcaggatcctgcttgtctcacttggatgtacttctctgctgcagatcccataagagacacaaattctggcctggtgggcccgctgctggtgtgcagggctggtgccttgggtgcagatggcaagcagaaaggggtggataaagaattctttcttctcttcactgtgttggatgagaacaagagctggtacagcaatgccaatcaagcagctgctatgttggatttccgactgctttcagaggatattgagggcttccaagactccaatcggatgcatgccattaatgggtttctgttctctaacctgcccaggctggacatgtgcaagggtgacacagtggcctggcacctgctcggcctgggcacagagactgatgtgcatggagtcatgttccagggcaacactgtgcagcttcagggcatgaggaagggtgcagctatgctctttcctcatacctttgtcatggccatcatgcagcctgacaaccttgggacatttgagatttattgccaggcaggcagccatcgagaagcagggatgagggcaatctataatgtctcccagtgtcctggccaccaagccacccctcgccaacgctaccaagctgcaagaatctactatatcatggcagaagaagtagagtgggactattgccctgaccggagctgggaacgggaatggcacaaccagtctgagaaggacagttatggttacattttcctgagcaacaaggatgggctcctgggttccagatacaagaaagctgtattcagggaatacactgatggtacattcaggatccctcggccaaggactggaccagaagaacacttgggaatcttgggtccacttatcaaaggtgaagttggtgatatcctgactgtggtattcaagaataatgccagccgcccctactctgtgcatgctcatggagtgctagaatctactactgtctggccactggctgctgagcctggtgaggtggtcacttatcagtggaacatcccagagaggtctggccctgggcccaatgactctgcttgtgtttcctggatctattattctgcagtggatcccatcaaggacatgtatagtggcctggtggggcccttggctatctgccaaaagggcatcctggagccccatggaggacggagtgacatggatcgggaatttgcattgttgttcttgatttttgatgaaaataagtcttggtatttggaggaaaatgtggcaacccatgggtcccaggatccaggcagtattaacctacaggatgaaactttcttggagagcaataaaatgcatgcaatcaatgggaaactctatgccaaccttaggggtcttaccatgtaccaaggagaacgagtggcctggtacatgctggccatgggccaagatgtggatctacacaccatccactttcatgcagagagcttcctctatcggaatggcgagaactaccgggcagatgtggtggatctgttcccagggacttttgaggttgtggagatggtggccagcaaccctgggacatggctgatgcactgccatgtgactgaccatgtccatgctggcatggagaccctcttcactgttttttctcgaacagaacacttaagccctctcaccgtcatcaccaaagagactgaaaaagcagtgccccccagagacattgaagaaggcaatgtgaagatgctgggcatgcagatccccataaagaatgttgagatgctggcctctgttttggttgccattagtgtcacccttctgctcgttgttctggctcttggtggagtggtttggtaccaacatcgacagagaaagctacgacgcaataggaggtccatcctggatgacagcttcaagcttctgtctttcaaacagtaacatctggagcctggagatatcctcaggaagcacatctgtagtgcactcccagcaggccatggactagtcactaaccccacactcaaaggggcatgggtggtggagaagcagaaggagcaatcaagcttatctggatatttctttctttatttattttacatggaaataatatgatttcactttttctttagtttctttgctctacgtgggcacctggcactaagggagtaccttattatcctacatcgcaaatttcaacagctacattatatttccttctgacacttggaaggtattgaaatttctagaaatgtatccttctcacaaagtagagaccaagagaaaaactcattgattgggtttctacttctttcaaggactcaggaaatttcactttgaactgaggccaagtgagctgttaagataacccacacttaaactaaaggctaagaatataggcttgatgggaaattgaaggtaggctgagtattgggaatccaaattgaattttgattctccttggcagtgaactactttgaagaagtggtcaatgggttgttgctgccatgagcatgtacaacctctggagctagaagctcctcaggaaagccagttctccaagttcttaacctgtggcactgaaaggaatgttgagttacctcttcatgttttagacagcaaaccctatccattaaagtacttgttagaacactgaaagactgaatttggtgatttttgacagtctctgtggcttctgtcactgtgattgaaacagaaaatacttagggggtgagtgagtatagtatgtatttgtctagcctttgtagaacctacaagtttttgttttagagatgaggaagctgttccagaggaagcatcaaagagtgctgggtaccaccctagaaaaggagctgtcgcataaatgacaaaaattttctgagtgtcaagaaaatttgccagagggaaatagaagtctgagacgagactcaaacctgtccagtgggccaggggaagtaggaccatatcttatggggcctttttggcagtggtggtgtgaaaggtctagttgcaactttgggggcttccttataggatggagtcattctttctggtattttacagcaatattcctttgttacatgcaaatttgagccaaatattggttagagagcacagataagtgataaattttagattgggtaagatggcccaccccactgcaatatccataatattgtaccacatggcaagtggagaacagaagaggtatcaaggagagaaaagatgataactatgtactgttttacactttaaaaagcattttaattcttgattgcgtttggattacctcagggcaagtcattttacatttgagtaatgttatccatttatacatttgagtgaacaaaagcttatggacattaagtaacttcatccaagatccctcaggtagaagttgagcagggattcatgtattcatctgtttgactccaaatacctatttcatcctcatatatcatggaaacatccactaatctccatccaccttacccatattgattccaacttttctgtctgtccagcaatctgtctgtctaggtagcaatctcttgaagataaaatgtagaaactcacagagctggtgttcagttacgatataagtttggaggagaaaacacaatccagaagctatgattcctcttgtttttccatggtcaatgggtttctggagagctttactgagaatctcagaaataaagtgtgggtggaagggggatttagatggctagttatccaagagttagtgtttaggccattgcagaatcaatgatttaacagcagcagaactgttttggcctgcagttaacatgaatgttaatgaagaccaagtacatgctaggaattccagtcaattaatggttataatttacatgcaactaggaggttcttagcttggtctcagttataactctaagagactaggagaggtagatgagatggaatgcatttcttcttattttgtaatcctgctccaggtcaaggaatagaaactcagagcccatgtatttaagaaagaaatgtatttttgtggtaagtttgctccaagtagggatacaagtatctatttttgacaatcaagtgacattgccatctattcagttgctcaagctggaaattatcagtgtcaacacatc

SEQ ID NO: 7891 - DNA, 536 bp, Homo sapiens
atctatttaccagtcattgttacatagctgggaggatatctaattagtattttttacatcagaaaattgtaagatgctttaatgatcagtttgtcctgtgctatatgtttatgaaactgctgaaacctacaaccttctaattggcagttggctgctaatcttatgaacagtggtgtgagactgaatgccatttgtccaggctttgttaacacagccatccttgaatcaattgaaaaagaagaaaacatgggacaatatatagaatataaggatcatatcaaggatatgattaaatactatggaattttggacccaccattgattgccaatggattgataacactcattgaagatgatgctttaaatggtgctattatgaagatcacaacttctaagggaattcattttcaagactatgatacaactccatttcaagcaaaaacccaatgaacagcttatgtgttagccatagctgaaaataagcacaaatagcttatattcagatcctatcttcatttgaatatagcttttaaatg

SEQ ID NO: 7892 - DNA, 490 bp, Homo sapiens
agagcttgaggggttcctggagggtggctgctgcggcgagacgccgagcatgttttccatccattcccacctgccctgctagctgagacgtgagattcgaggggtgccggaatataactgtgggttctactccgcgaagcggggtgggtctggcccgggctcactttgagaagcagccgccttccaatctgcggaaatccaacttcttccacttcgtcctggccctctacgacagacagggccagcccgtggagatcgagaggacagcgtttgtggggttcgtggagaaggaaaaagaagccaacagcgaaaagaccaataacggaattcactaccggcttcagcttctctacagcaatgggataaggacggagcaggatttctacgtgcgcctcattgactccatgacaaaacaagccatagtgtatgaaggccaagacaagaacccagaaatgtgccgagtcttgctcacacatgagatcatgtgcag

SEQ ID NO: 7893 - DNA, 857 bp, Homo sapiens
ggcgagaccaaccccggactgtgcctccaccacacccatccccacacctcttgggcaaggaggaccagagcacatgtcaagctccattcagcagccctggcatcactaaagggagatatagtggaacttaataaacgtctccagcaaacagagagggaacgggaccttctggaaaagaaattggccaaggcacagtgcgagcagtcccacctcatgagagagcatgaggatgtccaggagcgaacgacacttcgctatgaggaacgcatcacagagctccacagcgtcattgcggagctcaacaagaagatagaccgtctgcaaggcaccaccatcagggaggaagatgagtactcagaactgcgatcagaactcagccagagccaacacgaggtcaacgaggactctcgaagcatggaccaagaccagacctctgtctctatccccgaaaaccagtctaccatggttactgctgacatggacaactgcagtgacctgaactcagaactgcagagggtgctgacagggctggagaatgttgtctgcggcaggaagaagagcagctgcagcctctccgtggccgaggtggacaagcacattgagcagctcaccacagccagcgagcactgtgacctggctattaagacagtcgaggagattgagggggtgcttggccgggacctgtatcccaacctggctgaagagaggtctcggtgggagaaggagctggctgggctgagggaagagaatgagagcctgactgccatgctgtgcagcaaagaggaagaactgaaccggactaaggccaccatgaatgccatccgggaagagcgggaccggctccggaggagggtgag

SEQ ID NO: 7894 - DNA, 564 bp, Homo sapiens
acacagtactcggccacaccatggggcgcccactgcacctcgtcctgctcagtgcctccctggctggcctcctgctgctcggggaaagtctgttcatccgcagggagcaggccaacaacatcctggcgagggtcacgagggccaattcctttcttgaagagatgaagaaaggacacctcgaaagagagtgcatggaagagacctgctcatacgaagaggcccgcgaggtctttgaggacagcgacaagacgcccgcgtcctgccttggcctccgtagtcgctgagagccacagcctagagcgccagcgcgcaggcgcacaactgacgccaggccacgaacccagtactgctcctgcacagcagaagcactagcactgaggccgggcggcgaacccggcactgcgcctgcgcagcaaaaggacacgcactgaggccaggccgcgaacccagcacggtgcctgcgcagcaggaagaccggcatccacaccggacgacgaacccagcatcgcgcctgcgcagtaggaggagagcaatgccaccaggccgcgattgcgcagccgcagc

SEQ ID NO: 7895 - DNA, 291 bp, Homo sapiens; identical to SEQ ID NO: 6973

SEQ ID NO: 7896 - DNA, 537 bp, Homo sapiens
agatggaaaactatactcagccacagtgactgacttccttgccattgacgcagtcatttaccggagtcttggagaaagccctaccctgcggaccgtcaagcacgattcaaaatggttgaaagaaccatactttgttcaagccgtggattacggagattatatctacttcttcttcagggaaatagcagtggagtataacaccatgggaaaggtagttttcccaagagtggctcaggtttgtaagaatgatatgggaggatctcaaagagtcctggagaaacagtggacgtcgttcctgaaggcgcgcttgaactgctcagttcctggagactctcatttttatttcaacattctccaggcagttacagatgtgattcgtatcaacgggcgtgatgttgtcctggcaacgttttctacaccttataacaggtaatcatgccctagctgtgttgacctcatcaattcttcctggcttccttctcccagggggttctcttctaataaaccatatttgcaactgactgaaaattgcattca

SEQ ID NO: 7897 - DNA, 553 bp, Homo sapiens
ccgtctctgtttcccttcttctacatcagcctcctggcagagccaccttaaacaacatctgctagcctcttcacacagacctcaactttctcatctacgttcagagaagatgaagcttcatgttttctacatcactttcaggtttgcattaatgcagaatgtgtggatattgagaaagcctacaaatcaaccaattgctcatctaagtgcaaaggacatgctgtgtgtgaccatgagctccagtgtcaatgtgaggaaggatggatccctcccgactgcgatgactcctcagtggtcttccgccactatctaccactggcaccaggccacacaaacagaagaggaaaccccagatggtaaaggctgttcaaccccaagaggtgaactatatagtctgggctgtgattaccatggccccactttgcgtttctctcacactcttatcctgactacctatctatcatttctacccagcagcgttttgcagtaacacattcagaaatgtctcctttgccttttgttaaaggcaaaagagtccctaaaatgccgaggc

SEQ ID NO: 7898 - DNA, 697 bp, Homo sapiens
aagccgcttataaattaccgcttccttcgcgccgccgccaacgccgagccccgaggaccgcaagcccagaggacaagctgcgccaagagggagtgctggagctgttcacccagcgggtcagagagcgagccgggcaggccagcccccggccggcggaaccctggcacagcctgagcagatgctgcgggcggcgccgcagccaccccagatccagaaccagaaccacagcccttctgaggagctcccaaacgtgcgtttctcataccgtattttattttcctgtttgggagcggcctgcctgtgtttttcttggagatcatcataggccagtacacctctgaagggggcatcacctgctgggaaaagatctgccccttgttctctggtatcggctatgcctccgttgtaattgtgtccctcctgaatgtctactacatcgtcatcctggcctgggccacatactacctgttccagtccttccagaaggagctgccctgggcacactgcaaccacagctggaacacacctcactgcatggaggacaccatgcgcaagaacaagagtgtctggatcaccatcagctccaccaacttcacctcccctgtcatcgagttctgggagcgcaacgtgctgagcttgtcccctggaatcgaccacccaggctctctgaaatgggacctcgctctctgccttcttt

SEQ ID NO: 7899 - DNA, 711 bp, Homo sapiens
ggatttgtcctggcctcacttcacgtgcttataggcccctgctaagtggcgggcagtctccaggacattaaggacacagtggtgaaagacactagcccaatctatagagaacttcgagacggaaatagacaaacagctccaacaaggcaaaggaacccatcttttacttcggtgatgtggaatactctgtggatgagagtgctggctatgtggaagtgcaggtgtggagaacgggcactgacctgtccaagtcttctagtgtcacagtgaggtctcggaaaacagatcctccctctgcagatgctggaacagactatgtgggcatcagccgtaatttagattttgcacctggagtcaacatgcagcctgttcgtgttgtcattctggatgaccttggacaaccagcgctggagggaattgagaaatttgaactggtgcttcgcatgcctatgaacgcagcccttggcgagcccagcaaagccacagtgtccataaatgactctgtctccgatttgcctaagatgcaattcaaagaacgaatatatactggcagcgaaagtgatgggcagatagttacaatgatccataggactggggatgtccagtacagatcttcagtgagatgctacacccggcaggggtctgcacaggtgatgatggactttgaagaacgcccaaacactgatacctccatcatcacattcctccctg

SEQ ID NO: 7900 - DNA, 538 bp, Homo sapiens
aacaaataaggcaggaatgggctgtatctgctgttgaccatctcaacgcccaagcctgcctttcctggcttagggaggaggccctgttggggaactgagctttctccatagccagagatttttggttccagggcttcttgacatgaaactcccaaaagggtgaagtagagaaataaagtctccccgctgaactactatgaggtcagaagccttgctgctatatttcacactgctacactttgctggggctggtttcccagaagattctgagccaatcagtatttcgcatggcaactatacaaaacagtatccggtgtttgtgggccacaagccaggacggaacaccacacagaggcacaggctggacatccagatgattatgatcatgaacggaaccctctacattgctgctagggaccatatttatactgttgatatagacacatcacacacggaagaaatttattgtagcaaaaaactgacatggaaatctagacaggccgatgtagacacatgcagaatgaagggaaaacataag

SEQ ID NO: 7901 - DNA, 1137 bp, Homo sapiens
gtgcgaggccgcgggctgcgggagtgccctgctctggcctcgcttgttgctcttcggggactccatcacccagaaaatgtgatgttctgaatcgtggattttcaggttacaataccaggtgggccaaaattatccttccaagattaatcaggaaaggaaacagtttggacatcccagtagcagttacaattttctttggggccaatgacagtgcactaaaagatgagaatcccaagcagcacattcccctggaggagtacgctgcgaacctaaagagcatggtgcagtacctgaagtccgtggacatccctgagaatcgagtcattctcatcacgccgaccccactttgtgaaacagcctgggaagaacagtgcatcatacaaggttgcaaactaaatcgcctgaactctgttgttggtgaatatgccaatgcgtgtttacaagtggcccaagactgtgggactgacgtacttgacctgtggaccctgatgcaggacagccaggacttctcatcttatttatcagatggactacatttgtctccaaaggggaatgaatttttgttctcgcatctctggcctttgatagagaaaaaggtctcttctctacctttgctgcttccttactggcgggatgtagcagaagcaaaacctgaattaagtctgctgggagatggagaccattagccaatcacaggagacccaaatctgcttgttatctacagaactcaaagttgtcaatacgtagagcatcgacatagggcacacagcggccagaaaggtccctgcagcacaccttgcaggagttgtcagtttctggaacagagaacacgcattgacagctggattgttctgagacctgcctctcctcctgcctcctctttcctccctgaccatgctcccaaagagagacagcgttttgccatgttgaccaagctgctctcaaactcctgacctcaagtgatctgcccacctcggcctcccaaagtgatgggattacaggtgtgagtcaccacacctggctctctgtctattttgaaagcaagagaactccctcatcgactcccatggtttaagtggggtgggaagcagagtccagccagtccctgaccagtccatgaggatgccctcaaaccca

SEQ ID NO: 7902 - DNA, 931 bp, Homo sapiens
gagaggtggaacgtgttgtggtggatgcactgagtggcctgaagggtgacctggctggacgttactataggctcagtgagatgacagaggctgaacagcagcagcttattgatgaccactttctgtttgataagcctgtgtccccgttgctgactgcagcaggaatggctcgagactggccagatgctcgtggaatttggcacaacaatgagaagagcttcctgatctgggtgaatgaggaggatcatacacgggtgatctccatggagaagggtggtaacatgaagagagtgtttgaaagattctgccgaggcctcaaagaggttagagaagattgtgtaggggagctaggtgggaggacataaggaaaaccaaagagtagcataaatagattatgtaatttatcaaccaacccaagacatgtctgatggtaaaaaggactacctaggactcactctaggactaaaggtataaaccagctgggaccatactgggaaaaccaggacatgtggtcacactaagattaggaaaagagtgtcaggaaccttagaaagtgaagaaggcaggtaatgcaaagaaggaataactgagatggcacgtcagtgcctgggatgtgtgcagtgggatggtgaggtgtgcagataaggaaaacattcgagcttagattgatgttggcggggagaggttgctgtgttcatgactctaatataaccacccagttctgagacaaggtaggccttgactctggattctatcattcttgttaaagtatcgggtctaggctttaagttgagagttcagagggagactggggaaggtggaggatagaatggttcgagttctagaatatgtggctctagatgagaggttgaactgaatcatcaatcctacatggattgggtctccgtattcaagtctacattagaaatcc

SEQ ID NO: 7903 - DNA, 582 bp, Homo sapiens
gaggggcctgtggtggggatcctggggctgtcgggctgagtatgccgtgtgggtggagaggaagcctcggggaaatcgcccaggcttgaaactgttacaatatggctttccttggactcttctctttgctggttctgcaaagtatggctacaggggccactttccctgaggaagccattgctgacttgtcagtgaatatgtataatcgtcttagagccactggtgaagatgaaaatattctcttctctccattgagtattgctcttgcaatgggaatgatggaacttggggcccaaggatctacccagaaagaaatccgccactcaatgggatatgacagcctaaaaaatggtgaagaattttctttcttgaaggagttttcaaacatggtaactgctaaagagagccaatatgtgatgaaaattgccaattccttgtttgtgcaaaatggatttcatgtcaatgaggagtttttgcaaatgatgaaaaaatattttaatgcagcagtaaatcatgtggacttcagtcaaaatgtagccgtggccaactacatcaataagtgggtggagaataacacaaaca

SEQ ID NO: 7904 - DNA, 3330 bp, Homo sapiens
taagcaagaattccctatcctgatcaaggctttaagcctaaaagaaagcagaaataggcaccaccagcaatagagatgagaaattctgaagaacagccaagtggagggaccacggtattgcagcgtttgctacaagagcagcttcgctatggcaatcctagtgagaatcgcagcctgcttgccatacaccagcaagccacagggaatggccctcctttccccagtggcagtgggaacccgggccctcagagtgatgtgttgagtccccaagaccaccaccaacagcttgtggctcatgctgctcgacaagaaccccaggggcaggaaatccagtcagaaaacctcatcatggagaagcagctgtctcctcgaatgcaaaataatgaagaactcccgacctatgaagaagccaaggtccagtcccagtactttcggggccaacagcatgccagtgttggagctgccttctatgtcactggagtcaccaaccagaagatgaggactgagggacgcccatcagttcagcggctcaatcctggaaagatgcaccaagatgagggactcagagaccttaagcaagggcatgtccgttccttgagtgaacgactaatgcagatgtcactggccaccagtggagttaaggcccatccacctgttaccagtgctcccctctccccaccacaacccaatgacctctacaagaatcccacaagttccagtgaattctacaaggcccaagggccacttcctaaccagcatagcctgaagggcatggaacaccgaggccccccaccagaatatcccttcaagggcatgccaccccaatctgtagtgtgcaagccccaagagccagggcacttctatagtgagcatcgcctgaaccagccagggagaacagaggggcaactgatgaggtatcagcatccccctgagtatggagcagccaggccagcgcaggacatctcattgccattgtcagccaggaactcgcagcctcacagccctacttcttctctgacctctggggggtccttgcccttgctacaatctccaccatccactagattgtctcctgcccgacaccccttggtcccaaaccagggagaccattcagctcacctgcctaggccgcagcagcatttccttcctaatcaggctcaccagggggatcattaccgtctctcccaacctggcctgagtcagcagcagcagcaacagcagcagcagcaccatcatcaccatcaccaccaacaacagcagcagcagcagccacagcagcagccaggagaagcctattcagctatgcctcgggctcagccatcctctgcttcttatcagccagtgccagcagacccttttgccattgtttccagagcccagcagatggttgagatcctctcagacgagaaccggaacttgaggcaagagttggaaggatgctatgagaaggtggcaagactgcagaaggtggagacagaaatccagcgcgtctcggaggcatatgagaacctcgtgaagtcatcctccaaaagagaggccctagagaaagccatgagaaacaagctagagggcgagattcggaggatgcatgatttcaacagggatctgagagagcgtctagagactgccaacaagcagcttgcagagaaggaatatgaggggtcagaggacaccagaaaaaccatctcgcagctctttgcaaaaaataaagaaagccagcgtgagaaggagaagctggaagcggagctggccactgcccgttctaccaatgaggaccaaagacgacacatcgaaatccgagatcaggccctgagtaatgcccaggccaaggtggtaaagctggaagaagagctgaaaaagaagcaagtgtacgttgacaaggtggagaagatgcagcaggcccttgtacagctccaggcagcatgtgaaaaacgtgagcagctagagcaccgtctccggacacgactggagagggaactggaatccctgagaatccagcagcgtcagggcaactgtcagcccaccaacgtttcagaatacaatgctgctgcactgatggagctccttcgggagaaagaggagaggattctggctctggaagctgatatgacaaagtgggagcagaaatatttggaggagaatgtgatgagacattttgctctggatgctgctgcaactgtggctgctcagagggacacaacagtcatcagtcactctcctaacaccagctatgacacagctctagaagctcgcatccagaaagaggaggaagaaatcttgatggccaataagcgttgccttgacatggagggcaggattaagaccctccatgcccagattattgagaaggatgccatgatcaaagtactccagcagcgttcccggaaggagccgagcaagacagagcagctgtcgtgcatgcggccagcgaagtctctgatgtccatttccaatgctggatcaggcttgctctcccactcatccaccctgactggctcccccatcatggaagaaaagcgagacgacaagagctggaaggggagcctaggcattctcctgggtggagactaccgtgctgaatatgtcccttccacaccctcgcctgtgccaccctcgactcccctgctctcggctcactccaagacaggcagccgagactgcagtacccaaactgaacgtgggacggaatcgaacaaaactgcagctgttgctcccatctctgttcctgctccagttgctgctgccgccactgctgccgccatcactgccactgctgccaccatcaccaccaccatggtagctgctgctccagttgctgttgctgctgctgctgctccagctgctgctgctgccccgtctccagccactgccgctgctactgctgctgctgtttctccagctgctgctggtcagattccagctgctgcctctgttgcctcagctgctgccgttgctccttctgctgctgctgctgctgctgttcaggttgctccagctgctccggctccagttccagctccggctctggttccggttccagctccagcagcggctcaggcttctgctcctgctcagactcaggcaccaacttcagctccggctgtggctccaactccagctccaactccaactccagctgtggctcaggctgaggttcctgcaagtccagctaccggtcctggaccacatcgtttgtctataccaagtttgacctgcaatccagacaaaacagatgggcctgtgttccactccaatactctggaaagaaaaactcccattcagatcctgggacaagagcctgatgcagagatggtggaatatctcatctaa

SEQ ID NO: 7905 - DNA, 886 bp, Homo sapiens
gtgcctctgccaatatcaccatcgtggaatcaaacgagatcatcactggtatgccagcctcaactgaaggagcatatgtgtcttcagagtctcccattagaatatcagtatccacagaaggagcaaatacttcttcatctacatctacatccaccactgggacaagccatcttgtaaaatgtgcggagaaggagaaaactttctgtgtgaatggaggggagtgcttcatggtgaaagacctttcaaacccctcgagatacttgtgcaagtgccaacctggattcactggagcaagatgtactgagaatgtgcccatgaaagtccaaaaccaagaaagtgcccaaatgagtttactggtgatcgctgccaaaactacgtaatggccagcttctacagtacgtccactccctttctgtctctgcctgaataggagcatgctcagttggtgctgctttcttgttgctgcatctcccctcagattccacctagagctagatgtgtcttaccagatctaatattgactgcctctgcctgtcgcatgagaacattaacaaaagcaattgtattacttcctctgttcgcgactagttggctctgagatactaataggtgtgtgaggctccggatgtttctggaattgatattgaatgatgtgatacaaattgatagtcaatatcaagcagtgaaatatgataataaaggcatttcaaagtctcacttttattgataaaataaaaatcattctactgaacagtccatcttctttatacaatgaccacatcctgaaaagggtgttgctaagctgtaaccgatatgcacttgaaatgatggtaagttaattttgattcagaatgtgttatttgtcacaaataaacataataaaagg

SEQ ID NO: 7906 - DNA, 291 bp, Homo sapiens; identical to SEQ ID NO: 6973

SEQ ID NO: 7907 - DNA, 1178 bp, Homo sapiens
aaagttacctgtggccgcccaagtccgccactttctgctctgtgtctgcccattgccacgatccaggaggactccgcgccgcccggccgcctccgagctcgggccccatgtgaggggcccccccttatcccacctttccggctaggtgagggcgcgagcgggcgagcgagcgagagtggtgaggggggacggaaaagcagaattacctgtagctcttgttctgccatctcgggcgctctcacacaccttcacctgcacagacttgaaagtccagtttcaccagaggctgaggctccaggaaaagcggagcaagttcattggatcaaacatgtcacaagagtcggacaataataaaagactagtggccttagtgcccatgcccagtgaccctccattcaatacccgaagagcctacaccagtgaggatgaagcctggaagtcatacttggagaatcccctgacagcagccaccaaggccatgatgagcattaatggtgatgaggacagtgctgctgccctcggcctgctctatgactactacaaggtaggtccccagcctccacttttctcttcttcctgctccaggacaaccctttgctggtgggaagaaggaacagattgtttgtcccaggccagggaactaatagcatttccaaagtcaatatagaattcagcctcttcctgttctccttgctccctgcttccccatctacaaagctcaactttatcacccatccagaggaagtactcattttgggataatattttttgtgttccttgttcacatgcataaatattatttgcatattattcttaccatattacaaatacttccttgttgctatgtttactttaggattattatttttgctgaatgaagtatattacattgagtggctttattagtccattttcacactgctgataaagacatactggagactgagaagaaaaagcggtttaattggacttacagttccacatggctggggaggcctcagaatcatggcaggaagcaaaaggcactccttacacggcagtggaaacagaaaatgaagaagatgcaaaagtggaaacccctgataaaaccatcagatcttgtgagacttattcgctatcacgagaacagtatgggggaaactgctcccacaattcaaattatctgccacagtgtccct

SEQ ID NO: 7908 - DNA, 574 bp, Homo sapiens
gattcagaagtcgataagaccaggagaagtgaagatgtaacatgttatctgtcgctcctcttagctggcggagagaatttacatttaaagattagcagagtgagaaagagaaatctgccttttgttgtgtggggtgaggaggaggcatctacccctggccttgacgctatctcccatcacctctgctatccagacaggactcaccgaggcgcacgcgcccagcaccctgcctccggcgatgccgccccagcccctctgatggccctcctctctgctgccactcattccagaacaggaggcatgagcccggaacgcgcttgcttttaggagacagccactttctgtgtggtacgctggattcaaggatgcctgatcgtactgagaagcactccacaatgccagactcacctgtggatgtgaagacgcaatctaggctgactcctccaacaatgccacctcccccaactactcaaggagctccaagaaccagttcatttacaccgacaacgttaactaatggcacgagccattctcctacagccttgaatggcgccccctcaccacccaatggctt

SEQ ID NO: 7909 - DNA, 1032 bp, Homo sapiens
gagtggacggctcgagacggcggcgcgtgcagcagctccagaaagcagcgagttggcagagcagggctgcatttccagcaggagctgcgagcacagtgctggctcacaacaagatgctcaaggtgtcagccgtactgtgtgtgtgtgcagccgcttggtgcagtcagtctctcgcagctgccgcggcggtggctgcagccggggggcggtcggacggcggtaattttctggatgataaacaatggctcaccacaatctctcagtatgacaaggaagtcggacagtggaacaaattccgagacgaagtagaggatgattatttccgcacttggagtccaggaaaacccttcgatcaggctttagatccagctaaggatccatgcttaaagatgaaatgtagtcgccataaagtatgcattgctcaagattctcagactgcagtctgcattagtcaccggaggcttacacacagtgcaaactagaatatcaggcatgtgtcttaggaaaacagatctcagtcaaatgtgaaggacattgcccatgtccttcagataagcccaccagtacaagcagaaatgttaagagagtactctgagtgctatggaaccctatcaagaaacaaagtttatttcattattgtgctatgattataagttaactgatttaaggaaaaagtattattgattaagaattaatgtatgccattttccaagtgacaaataatttagttttaacgtttaattttgtatgatggaatttttttatatcctctgaattatggaatggattttcaatgagaaacagattaacatcagtgtattaatatactcttgcaacatgcatgcttctccgtaactaatatagtgtattcataaatggtaagttcttctgtaattttgtttaattggagccatggaaaaataaaattaagtcagtttattggcaagtgttgcataattatttataataaaaattaagttttactcatttggattatttgaaatacattcttggattaaattaatgtgtctg

SEQ ID NO: 7910 - DNA, 553 bp, Homo sapiens
tatgcaggcaacatagcccttcatagcaaagcagtctgaaaaattggcacctgcaggatttgcatgtgaaaaaaacggagtcagttgcattttgccggagtctattactaaaagattgatctctgggctggtgaacataatctctgtcccagtcagaaaaggagagaggaaattagcagagcgattggtggagaatgatatctgtcaaaagaaacacttggagagcactgagtttagtaataggtgactgccggaaaaaagggaactttgaatattgtcaagatcgtactgagaagcactccacaatgccagactcacctgtggatgtgaagacgcaatctaggctgactcctccaacaatgccacctcccccaactactcaaggagctccaagaaccagttcatttacaccgacaacgttaactaatggcacgagccattctcctacagccttgaatggcgccccctcaccacccaatggcttcagcaatgggccttcctcttcttcctcctcctctctggctaatcaacagctgcccccagcctgtggtgc

SEQ ID NO: 7911 - DNA, 2908 bp, Homo sapiens
tcctctggctccagccaagcgtcctatccggagccaactgtagctgggatccagcgagaggaagatgctcaaggtgtcagccgtactgtgtgtgtgtgcagccgcttggtgcagtcagtctctcgcagctgccgcggcggtggctgcagccggggggcggtcggacggcggtaattttctggatgataaacaatggctcaccacaatctctcagtatgacaaggaagtcggacagtggaacaaattccgagacgaagtagaggatgattatttccgcacttggagtccaggaaaacccttcgatcaggctttagatccagctaaggatccatgcttaaagatgaaatgtagtcgccataaagtatgcattgctcaagattctcagactgcagtctgcattagtcaccggaggcttacacacaggatgaaagaagcaggagtagaccataggcagtggaggggtcccatattatccacctgcaagcagtgcccagtggtctatcccagccctgtttgtggttcagatggtcatacctactcttttcagtgcaaactagaatatcaggcatgtgtcttaggaaaacagatctcagtcaaatgtgaaggacattgcccatgtccttcagataagcccaccagtacaagcagaaatgttaagagagcatgcagtgacctggagttcagggaagtggcaaacagattgcgggactggttcaaggcccttcatgaaagtggaagtcaaaacaagaagacaaaaacattgctgaggcctgagagaagcagattcgataccagcatcttgccaatttgcaaggactcacttggctggatgtttaacagacttgatacaaactatgacctgctattggaccagtcagagctcagaagcatttaccttgataagaatgaacagtgtaccaaggcattcttcaattcttgtgacacatacaaggacagtttaatatctaataatgagtggtgctactgcttccagagacagcaagacccaccttgccagactgagctcagcaatattcagaagcggcaaggggtaaagaagctcctaggacagtatatccccctgtgtgatgaagatggttactacaagccaacacaatgtcatggcagtgttggacagtgctggtgtgttgacagatatggaaatgaagtcatgggatccagaataaatggtgttgcagattgtgctatagattttgagatctccggagattttgctagtggcgattttcatgaatggactgatgatgaggatgatgaagacgatattatgaatgatgaagatgaaattgaagatgatgatgaagatgaaggggatgatgatgatggtggtgatgaccatgatgtatacatttgattgatgacagttgaaatcaataaattctacatttctaatatttacaaaaatgatagcctatttaaaattatcttcttccccaataacaaaatgattctaaacctcacatatattttgtataattatttgaaaaattgcagctaaagttatagaactttatgtttaaataagaatcatttgctttgagtttttatattccttacacaaaaagaaaatacatatgcagtctagtcagacaaaataaagttttgaagtgctactataataagtttttcacgagaacaaactttgtaaatcttccataagcaaaatgacagctagtgcttgggatcgtacatgttaattttctgaaagataattctaagtgaaatttaaaataaataaatttttaatgacctgggtcttaaggatttaggaaaaatatgcatgctttaattgcatttccaaagtagcatcttgctagacctagttgagtcaggataacagagagataccacatggcaagaaaaacaaagtgacaattgtagagtcctcaattgtgtttacattaatagtggtgtttttacctatgaaattattctggatctaataggacattttacaaaatggcaagtatggaaaaccatggattctgaaagttaaaaatttagttgttctccccaatgtgtattttaatttggatggcagtctcatgcagattttttaaaagattctttaataacatgatttgtttgcctttctagatttctttatctttctgaccagcaacttagggagcagaatttaaattaggaagacaaagggaaagattcatttaaaccatatttttacaaagtttgtcatttgccccaaggtcaaattttaaattcttaattttcattttatttcccattttaggtaaaagtttgcatttaatcttagaattatgttatttttgttagtagtgtggaaacttagagaacttattgtatggtgccttgcaaaaatagagatagaaagattttagcatgcataccaatatagtatattacgcaatatataagcacacctaattaacagattaatatcagtaaaggtattgctgctggaatgaagaaaatgggatacgtttgtttctttttttctattgttacataattgccatgtggacttgtttatgattattgtgtagagtagcatttaagatttaactgtagcaaaaattactttaaccgctgtatttaagttagcatgttaattaattgtgtagacattttggcacaccatcacttttaactatatcataccaatggttttgtgcccataataaaaatggaaaaacctgttgaatgttacgtattggtatctttaatttcaacagtgggtaaactggtttcccagtatacaattcattgaaagcaaaattgattaattatttccatttaatttatacacactcaatacaaaatttaatgttgactttacgtaataaagtataatgcattttcttttttactgtttatgtatagtttacaaaataaagaatcttgtaac

SEQ ID NO: 7912 - DNA, 766 bp, Homo sapiens
gacgtcctgtgcccagatcgacaggcatcctgggccgtggagcccatttttcttacttaaaattcagtctttttcctattctgctgcaaactacgatttgagatcaacaggaaaataggtcactttattctcttttaccttgattctttttccgtaacagaggagtattcaagctgtagtcggcatccgtgccaaaatgggggcacgtgcataaatggaagaactagctttacctgtgcctgcagacatccttttactggtgacaactgcactatcaagcttgtggaagaaaatgctttagctccagatttttccaaaggatcttacagatatgcacccatggtggcattttttgcatctcatacgtatggaatgactatacctggtcctatcctgtttaataacttggatgtcaattatggagcttcatataccccaagaactggaaaatttagaattccgtatcttggagtatatgttttcaagtacaccatcgagtcatttagtgctcatatttctggatttttagtggttgatggaatagacaagcttgcatttgagtctgaaaatattaacagtgaaatacactgtgatagggttttaactggggatgccttattagaattaaattatgggcaggaagtctggttacgacttgcaaaaggaacaattccagccaagtttccccctgttactacatttagtggctatttattatatcgtacataagttagtatgaaaaacagactatcacctttattgagaa

SEQ ID NO: 7913 - DNA, 1023 bp, Homo sapiens
atggtccgcgcgaggcaccagccgggtgggctttgcctcctgctgctgctgctctgccagttcatggaggaccgcagtgcccaggctgggaactgctggctccgtcaagcgaagaacggccgctgccaggtcctgtacaagaccgaactgagcaaggaggagtgctgcagcaccggccggctgagcacctcgtggaccgaggaggacgtgaatgacaacacactcttcaagtggatgattttcaacgggggcgcccccaactgcatcccctgtaaagaaacgtgtgagaacgtggactgtggacctgggaaaaaatgccgaatgaacaagaagaacaaaccccgctgcgtctgcgccccggattgttccaacatcacctggaagggtccagtctgcgggctggatgggaaaacctaccgcaatgaatgtgcactcctaaaggcaagatgtaaagagcagccagaactggaagtccagtaccaaggcagatgtaaaaagacttgtcgggatgttttctgtccaggcagctccacatgtgtggtggaccagaccaataatgcctactgtgtgacctgtaatcggatttgcccagagcctgcttcctctgagcaatatctctgtgggaatgatggagtcacctactccagtgcctgccacctgagaaaggctacctgcctgctgggcagatctattggattagcctatgagggaaagtgtatcaaagcaaagtcctgtgaagatatccagtgcactggtgggaaaaaatgtttatgggatttcaaggttgggagaggccggtgttccctctgtgatgagctgtgccctgacagtaagtcggatgagcctgtctgtgccagtgacaatgccacttatgccagcgagtgtgccatgaaggaagctgcctgctcctcaggtgtgctactggaagtaaagcactccggatcttgcaactacaccgaggaagaggaggaagatgaagaccaggactacagctttcctatatcttctattctagagtggtaa

SEQ ID NO: 7914 - DNA, 803 bp, Homo sapiens
atctaacggccaaagtggttttggaaaaaaaatgcacagaagacacctactcccaccagcggagttccggagccctcgcagcctcctgttgaccgctcccgcctaatgcagccgctgaccgcccactccccgacggccaggactccccagggacagggacgtgtccccagggcaggcccctggatggacgcggcgactgaccccacttcgctggacgctgtgctgggaaggacacagagaggtggctggggcagcctgcggtcacaaagcgaggcccaaaggggcgctctcctcacccccacgtctcctgggtgccgacctgcaccctcccttcgccaccggactggggccatctgggatgtctcgggggtatccggagggctaagcaccgccgagggacggctccgtgggaagagttttctggacccagaaggcagacgccagtagtactgtcctaggagtcggaggtcggggtgggggagttctcagctctttgggtcgcacggagcttttcttggggaagcccgtcagcctgagctacagatgcccatgccgattcttcgaaagccatgttgccagagccaacgtcaagcatctcaaaattctcaacactccaaactgtgcccttcagattgtagcccggctgaagaacaacaacagacaagtgtgcattgacccgaagctaaagtggattcaggagtacctggagaaagctttaaacaagtaagcacaacagccaaaaaggactttccgctagacccactcgaggaaaactaaaaccttgtgagagatgaaagggcaaa

SEQ ID NO: 7915 - DNA, 700 bp, Homo sapiens
ctgatttttataatgactggatgttcattgctaaacatctgcctgatctcatagagtctggccagcttcgagaaagagttgagaagttaaacatgctcagcattgatcatctcacagaccacaagtcacagcgccttgcacgtctagttctgggatgcatcaccatggcatatgtgtggggcaaaggtcatggagatgtccgtaaggtcttgccaagaaatattgctgttccttactgccaactctccaagaaactggaactgcctcctattttggtttatgcagactgtgtcttggcaaactggaagaaaaaggatcctaataagcccctgacttatgagaacatggacgttttgttctcatttcgtgatggagactgcagtaaaggattcttcctggtctctctattggtggaaatagcagctgcttctgcaatcaaagtacgtctatcctcacttcaaaatttatatgtcaatttacgtaagcagagcaatcacttcggagcctaaactatactaagcatgagttaactttatccttaacaagtacaacatgggatcatttaattgggggtaaaggatcaattatttatttttgtgtattacctaaaatataaaatctcagagccatatacttaaaatccaacttgaaacctctgtaggagataaaaattttcaataaaatctggctttggaactat

SEQ ID NO: 7916 - DNA, 545 bp, Homo sapiens
cccctctggcaggctcccgccagcgtcgctgcggctccggcccgggagcgagcgcccggagctcggaaagatgcggcgcccgcggcggcctgggggtctcgggggatccgggggtctccggctgctcctctgcctcctgctgctgagcagccgcccggggggctgcagcgccgttagtgcccacggctgtctatttgaccgcaggctctgctctcacctggaagtctgtattcagggtgagtgaggcccaagcatagaactcacaagatcggggggagaggggcaataaaaaacaagaaggggagagaaggcccagaaaggaagagggctactgggcttgagaagaaggaagacttgcctggaggaggagaggtaggggagaaagtgaagagagtacagtccatttgcaacctggactttggaaggcctcttattcaagccccctgctgacaccacttttgtgcccttagatggcttgtttgggcagtgccaggtgggagtggggcaggcccggccccttttgcaagtcacctccccagttctcc

SEQ ID NO: 7917 - DNA, 738 bp, Homo sapiens
gacaaccccagcaatgtggagaagcctggggcttgccctggctctctgtctcctcccatcgggaggaacagagagccaggaccaaagctccttatgtaagcaacccccagcctggagcataagagatcaagatccaatgctaaactccaatggttcagtgactgtggttgctcttcttcaagccagctgatacctgtgcatactgcaggcatctaaatgtggccgtcttgtatatcatcttggtttgcctttttccttcctaactttcccatatgtagaagaagccattaagattgcttactgtgaaaagaaatgtggaaactgctctctcacgactctcaaagatgaagacttttgtaaacgtgtatctttggctactgtggataaaacagttgaaactccatcgcctcattaccatcatgagcatcatcacaatcatggacatcagcaccttggcagcagtgagctttcagagaatcagcaaccaggagcaccaaatgctcctactcatcctgctcctccaggccttcatcaccaccataagcacaagggtcagcataggcagggtcacccagagaaccgagatatgccagcaagtgaagatttacaagatttacaaaagaagctctgtcgaaagagatgtataaatcaattactctgtaaattgcccacagattcagagttggctcctaggagctgatgctgccattgtcgacatctgatatttgaaaaaacagg

SEQ ID NO: 7918 - DNA, 612 bp, Homo sapiens
gcagaggggtccgcgggctctggaggtgctggacgggtgcgatccgagagcagaccggggccctcgcgagcctctcccggcccctgcccgcgatgagcgaggccagccgactgtgctccggctactacagcctcaaccagagcttcgtggagcccttccagtgcccccggcgcggcgagggggcagcgctccagtattgctgcggcttcgccgacctcaagtactgctgcagcgagccgggcagctacttcccctacaagcacagctacatgtggagcctcaggtcaaacttgtcagtgtcctaatcccagagaaagagcagaagcctaaaggcaagccaggaagataatgaagaaaaagatcattacttttcaatgaccattggtgccttgattggactaggaattgctgcccttgttttactcgcctttgtcatcagtgtctgtgtcctttgctatttatttctgtatacgaaacctcaaagattagacactggccttaagcttcaacacttagaggcttcttccactcaagaaggcaagtcaaatggaaaaaccaaagccctcaattcaaatgcagcatcaaatgcaacaaatgaaacatactatgaag

SEQ ID NO: 7919 - DNA, 757 bp, Homo sapiens
aatggagcaataaaaaacaacatttaacaacagaagccagtccttcaaaggggcctgatacttggagagagtggagttctgatggaaaaaatttaataatctattggaagatgaggaaacacagtccctttctgaaatccctgatcctcagcacaaagcagagatacgacttgataagaatgactacatcatcagcgtagtggctaaaaattctgtgggctcatcaccaccttccaaaatagcgagtatggaaattccaaatgatgatctcaaaatagaacaagttgttgggatgggaaaggggattctcctcacctggcattacgaccccaacatgacttgcgactacgtcattaagtggtgtaactcgtctcggtcggaaccatgccttatggactggagaaaagttccctcaaacagcactgaaactgtaatagaatctgatgagtttcgaccaggtataagatataattttttcctgtatggatgcagaaatcaaggatatcaattattacgctccatgattggatatatagaagaattggctcccattgttgcaccaaattttactgttgaggatacttctgcagattcgatattagtaaaatgggaagacattcctgtggaagaacttagaggctttttaagaggatatttgttttactttggaaaaggagaaagagacacatctaagatgagggttttagaatcaggtcgttctgacataaaagttaagaatattactgacatatcccag

SEQ ID NO: 7920 - DNA, 432 bp, Homo sapiens
ctctaatgcttaaaaagtagtaaaacttcacatctgttcaggagataaatgcaaagtttgcttcttcatctcaagggacactccatttttaacatcttttctgagtttcattctaatgtcagccagtggagaaatggttttcatgatatggataccgttactttgttcatttttaatcttttttttttttctttcatagtggaaaggtgaaatccaggaattttgtccaaataccaaaatgctcttggtcggctgcaagtctgatctgcggacagatgttagtacattagtagagctctccaatcacaggcagacgccagtgtcctatgaccagggggcaaatatggccaaacagattggagcagctacttatatcgaatgctcagctttacagtcggaaaatagcgtcagagacatttttcacgttgccac

SEQ ID NO: 7921 - DNA, 2037 bp, Homo sapiens
atgcagagcaaggtgctgctggccgtcgccctgtggctctgcgtggagacccgggccgcctctgtgggtttgcctagtgtttctcttgatctgcccaggctcagcatacaaaaagacatacttacaattaaggctaatacaactcttcaaattacttgcaggggacagagggacttggactggctttggcccaataatcagagtggcagtgagcaaagggtggaggtgactgagtgcagcgatggcctcttctgtaagacactcacaattccaaaagtgatcggaaatgacactggagcctacaagtgcttctaccgggaaactgacttggcctcggtcatttatgtctatgttcaagattacagatctccatttattgcttctgttagtgaccaacatggagtcgtgtacattactgagaacaaaaacaaaactgtggtgattccatgtctcgggtccatttcaaatctcaacgtgtcactttgtgcaagatacccagaaaagagatttgttcctgatggtaacagaatttcctgggacagcaagaagggctttactattcccagctacatgatcagctatgctggcatggtcttctgtgaagcaaaaattaatgatgaaagttaccagtctattatgtacatagttgtcgttgtagggtataggatttatgatgtggttctgagtccgtctcatggaattgaactatctgttggagaaaagcttgtcttaaattgtacagcaagaactgaactaaatgtggggattgacttcaactgggaatacccttcttcgaagcatcagcataagaaacttgtaaaccgagacctaaaaacccagtctgggagtgagatgaagaaatttttgagcaccttaactatagatggtgtaacccggagtgaccaaggattgtacacctgtgcagcatccagtgggctgatgaccaagaagaacagcacatttgtcagggtccatgaaaaaccttttgttgcttttggaagtggcatggaatctctggtggaagccacggtgggggagcgtgtcagaatccctgcgaagtaccttggttacccacccccagaaataaaatggtataaaaatggaataccccttgagtccaatcacacaattaaagcggggcatgtactgacgattatggaagtgagtgaaagagacacaggaaattacactgtcatccttaccaatcccatttcaaaggagaagcagagccatgtggtctctctggttgtgtatgtcccaccccagattggtgagaaatctctaatctctcctgtggattcctaccagtacggcaccactcaaacgctgacatgtacggtctatgccattcctcccccgcatcacatccactggtattggcagttggaggaagagtgcgccaacgagcccagccaagctgtctcagtgacaaacccatacccttgtgaagaatggagaagtgtggaggacttccagggaggaaataaaattgaagttaataaaaatcaatttgctctaattgaaggaaaaaacaaaactgtaagtacccttgttatccaagcggcaaatgtgtcagctttgtacaaatgtgaagcggtcaacaaagtcgggagaggagagagggtgatctccttccacgtgaccaggggtcctgaaattactttgcaacctgacatgcagcccactgagcaggagagcgtgtctttgtggtgcactgcagacagatctacgtttgagaacctcacatggtacaagcttggcccacagcctctgccaatccatgtgggagagttgcccacacctgtttgcaagaacttggatactctttggaaattgaatgccaccatgttctctaatagcacaaatgacattttgatcatggagcttaagaatgcatccttgcaggaccaaggagactatgtctgccttgctcaagacaggaagaccaagaaaagacattgcgtggtcaggcagctcacagtcctaggtagggagacaattctggatcattgtgcagaggcagttggaatgccttaa

SEQ ID NO: 7922 - DNA, 783 bp, Homo sapiens
agagcttactcacatagcatattggtatatcaaaatgaaatgcaaggaaccaaaaataacataattgaaggcagtaaaagtgaaattaaataggaagatcatcagtcaaggaagacccactggagactgaaaccacctgttttcagagcttcaggaaaagacttaatctgaaggatcctgcagctaaaaagctttgaaaactgtgttaaggggccccataagcatcgcttctaaacttcactgacaaaagggactggggtcatgctgtctggagtcagagtgagggacagaaaatgaagcagtgttttatcatgtgtatttcagcaggtcttcttgaaatttaactaaaaatatgactgctctctcttcagagaactgctcttttcagtaccagttacgtcaaacaaaccagcccctagatgttaactatctgctattcttgatcatacttgggaaaatattattaaatatccttacactaggaatgagaagaaaaaacacctgtcaaaattttatggaatatttttgcatttcactagcattcgttgatcttttacttttggtaaacatttccattatattgtatttcagggattttgtacttttaagcattaggttcactaaataccacatctgcctatttactcaaattatttcctttacttatggctttttgcattatccagttttcctgacagcttgtatagattattgcctgaatttctctaaaacaaccaagctttcatttaagtgtcaaaaattattttatttctttacagtaat

SEQ ID NO: 7923 - DNA, 535 bp, Homo sapiens
gtagagggaatgagtcaggctccggctccacactggcacgtagtgggcggatcgcgccggcgctgagtaggaaggagcttcagccgccagcccggaacgcacagcaagcacctgcctcagctgacccttgagccataacccataagctcctgaaaagtacatcaagtctaaagtgaaccagctaactcattaagactggaatcatgagcaacaatggagcagacctaacctttggttacatctcctgttttgtagctatccttttgtttggctcaaattttgtgccacttaaaaaatttgatactggtgatggaatgtttctccagtgggttctttgtgctgccatatggttggttgccttggttgtcaatctgatattacattgtccaaagttttggccttttgcaatgcttgggggctgcatttgggcaacagggaacattgctgttgtcccaattatcaaaaccattggtttaggccttggaatcttaatctggggatcatttaatgccttaactggctgggcaagctcaag

SEQ ID NO: 7924 - DNA, 640 bp, Homo sapiens
tttttccacccctccacccctttcgatttatttcctacttttctcccgcgtctctctcacttcccctcctccacgctcaccccctccccatccccgccgggtctccttcgctagccacctcgctctccctgccctgccaccgctcactgctcactcacccacctccccacccttgtctcttcacagctgggaactgctggctccgtcaagcgaagaacggccgctgccaggtcctgtacaagaccgaactgagcaaggaggagtgctgcagcaccggccggctgagcacctcgtggaccgaggaggacgtgaatgacaacacactcttcaagtggatgattttcaacgggggcgcccccaactgcatcccctgtaaagaaacgtgtgagaacgtggactgtggacctgggaaaaaatgccgaatgaacaagaagaacaaaccccgctgcgtctgcgccccggattgttccaacatcacctggaagggtccagtctgcgggctggatgggaaaacctaccgcaatgaatgtgcactcctaaaggcaagatgtaaagagcagccagaactggaagtccagtaccaaggcagatgtaaaaagacttgtcgggatgttttctgtccaggcagctccacatgtgt

SEQ ID NO: 7925 - DNA, 536 bp, Homo sapiens
ggtgatgtgttccacctcactgtccccagtaaattcaccttcgaggaggctgcaaaagagtgtgaaaaccaggatgccaggctggcaacagtgggggaactccaggcggcatggaggaacggctttgaccagtgcgattacgggtggctgtcggatgccagcgtgcgccaccctgtgactgtggccagggcccagtgtggaggtggtctacttggggtgagaaccctgtatcgttttgagaaccagacaggcttccctccccctgatagcagatttgatgcctactgctttaaacgtcgaatgagtgatttgagtgtaattggtcatccaatagattcagaatctaaagaagatgaaccttgtagtgaagaaacagatccagtgcatgatctaatggctgaaattttacctgaattccctgacataattgaaatagacctataccacagtgaagaaaatgaagaagaagaagaagagtgtgcaaatgctactgatgtgacaaccaccccatctgtgcagtacataaatgggaagca

SEQ ID NO: 7926 - DNA, 951 bp, Homo sapiens
ttttccttcagtttcctatatgagttatttaaggatttagatggttttatgagccacttagtatttacaacccttcttaattgtaccctcttcctcacaggggaacatttgcctaaatctttggaaggattttttatctatgaagaagaaggttctggagttccaggttctagtaggaaaggaaatgatgccatcgtagtagaacaatggactgttattgagggatgtgaaatcaaaacagattatggccctctgctgcacactctggctgaattcggatggcttctgacaagcgtgttgcccacacctgtattgagacatgacagtgaagggaatttggctacaaagcagatcgtattccttcagaggccagttatgtggaattcagctgctcaaacaccagataagaaagccagccgccacataaaaggtgaagacaagaataaagccactagtagaagcatcggattagacacaacctcgtcacaacctgcagagagcagacacctgcctgaggagtgccgcctttctccctcccgggaatgctggacaaaggagggaaggctggcacagcacaacagcttctctgggttcagcagcagtgacaacgtcctccgggaattagacgacggacagtttgatcaggaagatggagtgactcaggtcacttgtatgtgagccatgaggtgaagcaaaggaaggccctgtaaataattgttaaaatcattgccaactgaccttattgtattactttctctgcatttatgtaatatttttgaatttttccagacccagcctttcctctaatctatgtaaactttggcacaacctcccagacaaggaagaataaccaacatatttatacatttagaatcatgtttacacttctctcaactaaaacatctggttaaacagatgttccattcggttattacacaataatctatttca

SEQ ID NO: 7927 - DNA, 1464 bp, Homo sapiens
gaaatagctattgatataccctctatttagatacactgcatttctctccctaaaagctatagctccctaaaagcaagctgtagacttgcattaatggcatccttttcatcttcaaacccacttgtgaatttgtttcttttctctactaggagcagatccctgcttatatcaaaacggaggctgtgaacatatttgcaaaaagaggcttggaactgcttggtgttcgtgtcgtgaaggttttatgaaagcctcagatgggaaaacgtgtctggctctggatggtcatcagctgttggcaggtggtgaagttgatctaaagaaccaagtaacaccattggacatcttgtccaagactagagtgtcagaagataacattacagaatctcaacacatgctagtggctgaaatcatggtgtcagatattgatgagtgccaactgggggagcacagctgtggagagaatgccagctgcacaaatacagagggaggctatacctgcatgtgtgctggacgcctgtctgaaccaggactgatttgccctgactctactccaccccctcacctcagggaagatgaccaccactattccgtaagaaatagtgactctgaatgtcccctgtcccacgatgggtactgcctccatgatggtgtgtgcatgtatattgaagcattggacaagtatgcatgcaactgtgttgttggctacatcggggagcgatgtcagtaccgagacctgaagtggtgggaactgcgccacgctggccacgggcagcagcagaaggtcatcgtggtggctgtctgcgtggtggtgcttgtcatgctgctcctcctgagcctgtggggggcccactactacaggactcagaagctgctatcgaaaaacccaaagaatccttatgaggagtcgagcagagatgtgaggagtcgcaggcctgctgacactgaggatgggatgtcctcttgccctcaaccttggggtcaatgcaaccaacttcatggaggcaggagccccagttatgtggaatgggcacagagcaaggctgctggattccagtatccagtgataagggctcctgtccccaggtaatggagcgaagctttcatatgccctcctatgggacacagacccttgaagggggtgtcgagaagccccattctctcctatcagctaacccattatggcaacaaagggccctggacccaccacaccaaatggagctgactcagtgaaaactggaattaaaaggaaagtcaagaagaatgaactatgtcgatgcacagtatcttttctttcaaaagtagagcaaaactataggttttggttccacaatctctacgactaatcacctactcaatgcctggagacagatacgtagttgtgcttttgtttgctcttttaagcagtctcactgcagtcttatttccaagtaagagtactgggagaatcactaggtaacttattag

SEQ ID NO: 7928 - DNA, 4208 bp, Homo sapiens
agtgagccggctgagaggcatggagacgcaggaacttcggggggccctggctcttctcctcctttgctttttcacatctgccagtcaggatctgcaggtaattgacctgctgactgtgggcgagtctcggcagatggtagctgtggcagagaagatccggacagccttgctcactgctggggacatctacctcttatccaccttccgcctgccccccaagcagggtggtgtcctctttggcctctattctcgccaagacaacactcgatggctggaggcctctgttgtaggcaagatcaacaaaggtgactggtgggcatctcctttcttgcaatggtgacctccttaagcactctccctcatccctacttcccaagtgcttcctcattctccttggcctccattagggaccaaggtcccatcaggctgtgcccagacatcaggggcacctggtatggggtgcttataaggtgctttaggagcccatgtaccaaacaatagggtgaggcttgagtcctgatatttatagggatgggaggttgtacttggggatgcctggaaggagggtgaggcatgtctctgtgcctcagcggtgatacagaaaggtctttcagatccctggaacaggtcagtggccacaaaaccagctgtcaccctaggagaggatacagtcatctgataccaatgaagactaagaaagtatttgtctctaaaccaattatttttttaaatggagtcttgctttgtcacctaggctggagtgcagtggtacaatctcagctcactgcaacctctgcctcctgggttcaagcaattctcctatctcagcctcctgagtagctgggactacaggtgcccaccaccatgcctggctaacttttgtatttttagtagaaacagggttttgccatgttgaccaggctgttctcgaacttctgacctcaagtgatctgcccaccttggccttctaaagtgctgggattacaggtgtgagccaccgtgcctggcctctaaagcaatttcaaaaacatttattgtgtacctattaaatacaaggtgttgagagccacatagtagaattagggataggggccctagagatgtggtatctagcagagttgatccaaggctcagctgggaggcagggggtgggggatagcgcccatactgatctcccctcctgggcagtactggtgcgataccagcgggaggatggcaaagtccacgccgtgaacctacagcaagcgggcctggctgatgggcgcacacacacagttctcctgcgactccgaggtccctccagacccagccctgccctacatctctacgtggactgcaaactgggtgaccaacatgcaggccttccagcactggcccccattcctccagcggaggtcgatgggctggagattaggactggacagaaggcgtatttgaggatgcagggctttgtggaatctatgaaaattattctgggtgggtccatggcccgggtaggagccctgagtgagtgtccattccaaggggacgagtccatccacagtgcagtgaccaatgcactgcactccattctaggggagcagaccaaggcgctggtcacccaactcaccctcttcaaccagatcctggtggagctgcgggatgatatacgagaccaggtgaaggaaatgtccctgatccgaaacaccattatggagtgtcaggcttccatgagcagcgttcccactgcagccccaatccctgcttccgaggtgtggactgcatggaagtgtacgagtacccaggctaccgctgtgggccctgcccccctggcctgcagggcaacggcacccactgcagtgacatcaatgagtgtgctcacgctgacccctgtttcccgggctccagctgcatcaacaccatgcccggcttccactgtgaggcctgtcctcgagggtacaagggcacacaggtgtctggtgtgggcattgactatgcccgggccagcaaacaggtctgcaatgacatcgatgaatgcaacgatggcaacaatggtggctgtgacccaaactccatctgcaccaacactgtgggctctttcaagtgtggtccctgccgcctgggtttcctgggcaaccagagccagggctgcctcccagcccggacctgccacagcccagcccacagcccctgccacatccatgctcactgtctctttgaacgcaatggtgcagtgtcctgccagtgtaacgtgggctgggctgggaatgggaacgtgtgtgggactgacacagacatcgatggctacccagaccaagcactgccctgcatggacaacaacaaacactgcaaacaggacaactgccttttgacacccaactctgggcaggaagatgctgataatgatggtgtgggggaccagtgtgatgatgatgctgatggggatgggatcaagaatgttgaggacaactgccggctgttccccaacaaagaccagcagaactcagatacagattcatttggtgatgcctgtgacaattgccccaacgttcccaacaatgaccagaaggacacagatggcaatggggaaggagatgcctgtgacaacgacgtggatggggatggtgcaggcctggggctgaaggggtggctgggggacctgtgagaatttggatcaggtggggatgaagcagggaagctaggaagtctctgtgaaatagggaggcaggcttgtggacgttggcctgggtgaggagagattacctgcagcagatgtcaataggaatgtgaggtagggcgtagtgttaggcagagtgtggactagagggtgagacaagaaacaggcagatttcctggccagttgtcctctgggtggggagacaaagttcgggactttcaccaacctagaagagagaatatggcatgttctagtaacaaccttgtgctacccatgtcttctaggcatccccaatggattggacaattgccctaaagtccccaacccactacagacagacagggatgaggacggggtgggagatgcttgcgacagctgccctgaaatgagcaatcctacccagacagatgcagacagcgacctggtgggggatgtctgtgatactaatgaagacagcgatggggatgggcatcaggacaccaaggacaactgcccacagctgccaaatagctcccagctggactctgataacgatggacttggagatgagtgtgatggggatgatgacaatgatggcatcccagattatgtgcctcctggtcccgataactgccgcctggtacccaatcccaatcagaaggactcagatggcaatggcgttggtgatgtgtgtgaggatgactttgacaatgatgctgtggtcgaccccctggatgtgtgtcctgaaagtgcagaggtaacgcttacggattttcgggcctatcagaccgtcgtcctggatcctgagggtgatgctcagattgacccaaactgggttgtgctcaaccagggcatggaaatcgttcagaccatgaacagtgaccctggcttggcagttggatacacggccttcaatggtgtggactttgaaggcaccttccatgtgaacacagtgactgatgatgactacgcaggctttctcttcagttatcaagacagtggccgcttctacgtagtcatgtggaagcagaccgagcagacctactggcaggctacacccttccgggcggttgcccagcccgggctgcagctcaaggcagtgacatcagtgtctggcccagggtgaagctctatgagggaccccagcttgtggcggattctggggtgatcattgacacatccatgcgaggggggcgtcttggtgtattctgcttctcccaagaaaacataatttggtccaatctccagtatcgatgcaatgacacagtgcctgaggactttgagccattccggaggcagctgctccagggaagggtgtgaggaggaggccaccagattcagaattcagaattttagaccctttggccttggggtccatcctggagaccctgaggtctaagctacagcccctcagccaaccacagacccttctctggctcccaaaaggagttcagtcccagaggggtggtcaccccacccttcaggggatgagaagttttcaaggggtattactcaggcactaaccccaggaaagatgacagcacattgccataaagttttggttgttttctaa

SEQ ID NO: 7929 - DNA, 2328 bp, Homo sapiens
cagggagatgttttaaagatgaatccgaatttggaagacttccattatgattacattgacttgctaaaggaaccagcaaaaaataagcagacaatattcaatgaagaaaggaataaggggcaggtgcaggtggcagatcttttgggcatcaatggaacaggggaagagcgactaccacaagacctgaaggtgtccactgacaaggagggtggcgtccaggacctgctcctgcctgaagacatgctctcaggggaagaatatgagtgtgtctcacctgatgacatctccttgcctcctctcccaggaagccctgagtcccctcttgcaccatctgacatggaggtggaagagcctgtcagctcctccctcagccttcacataagcagctatggggtgcaggctgggaccagcagcccaggggatgcccaggaatctgttcttccaccacctgttgcctttgcggatgcatgcaatgataagagagaaacattttcaagtcattttgagaggccttacctccagttcaaagctgagcccccactaacctccagaggattcgtggaaaagagtactgccttacacagaatcagtgctgaacatccagagagcatgatgagtgaagtgcatgagagagctttacagcagcaccctcaggctcagggtggtttgctagaaacacgggagaaaatgcatgctgataataacttcactaaaacccaagataggctgcatgcttcctctgatgcattctcgggcctcaggtttcaatcaggcaccagcaggggctatcagaggcaaatggttcctcgagaagagattaaaagcacatcagcaaagagcagcgtggtcagcctagctgaccaggcacctaatttctccaggctcctgtctaatgtaactgtcatggaaggttctccagtgactttggaagttgaagtaacaggatttccagagcctacactgacatggtacaagaagggccagaaattgtctgcagatgggcacttacaggttttacacaaggagacaaggcattcggtgttcattccaaaggtatgcaaggcagacgcaggcctctatgtggctcgggcccaaaactctagcggcgctctctcttccaatgtcatcctccacgtgacaggtaactgcaggctgccaatcacaagagtaaactggataaccctgtgtgtcgtctatgttagtgtgtccctaatgtactggctcctcacacaataactgtggtgttggcaccaatggacatcattctcatgtgcctaaagaaaagtgccgccgtttatcttcctgcacctcctgcaaagcatctcccaccaagtgtatctccagtctgatcaccatacttgtttggctaataccactgctaggtgaaataatcaaattttctggagcgtttaatatatttgagaagcttggtaaattatctgtagtggataagaacagatttttgtactctagaaacagatgttttcaacataatatgcagcaaaattattctatgcctattccctcctaatttaagggcgtgcagatgaaggctgacatcggcatagaaatgtgctaaatttcaaatatggttgttcaataatatatttttaattgtattttaaaacatccctttgtagggaatatcagtagaactattgaattgatgttgtatttttgcattagctgtcctttaattttgctttccatgtcttgatcttgttaccgaaatgcattctgtgtaatttcaacgtagactacgttcctgagtctgatgatgtcattgtaaataatcattcctcatgttgctctcacgggtttgacattggaggatagatgtgccatcaactttaaatagagtttccatcttttgtcagctctgcatgtcatacagcaagatggaacacaggttgcaagaaagaaccaacgttattcctgacattctattgatgtgttttgagcagcaatgtgtaaccaggtgtttctgcttctaatcttgattctgctgatgaccatttttatactttatggcaaagcctcattgcctcagtttcctgtctggaaaatgagttcatcatctacctcttgggcaattgagagttttcattttgtgtcttttaaacatctggaaaatggaaaacactgagggctaaggataatgatattgtttaatgtaatttgtcatcagaccggcctcctgctcactatttctttttttttagatgctgtttttttagaatattaaattaaaggagtgctgttaatatgtaatcttcaactagttccatggaggaaagtgatgttttatgaattagagcttaaattcct

SEQ ID NO: 7930 - DNA, 638 bp, Homo sapiens
gtttaaagaagatccgcctctggggttttatattgctctggtattcatgccaaagacacaccagccctcagtcactgggagaagaacctctcataccctcggtgctccagtccccagctcactcagccacacacaccatgtgtgaagaggagaccaccgcgctcgtgtgtgacaatggctctggcctgtgcaaggcaggcttcgcaggagatgatgccccccgggctgtcttcccctccattgtgggccgccctcgccaccagggtgtgatggtgggaatgggccagaaagacagctatgtgggggatgaggctcagagcaagcgagggatcctaactctcaaataccccattgaacacggcatcatcaccaactgggatgacatggagaaggtatctgtagacttccccttaatgagcctgctttaatgatcacccatcatcatgaccctcgtattcataggccactgtgctctgtcaactctccctctaaaatgcttctcacttctgtctttcctttcttttcagccccacgaccatttctccaacctaggctgccaacatctctccctggactattgcaatggcttcctggctgatttcttggtctcttgccctcattcaccgaattaattctct

SEQ ID NO: 7931 - DNA, 1116 bp, Homo sapiens; identical to SEQ ID NO: 4376

SEQ ID NO: 7932 - DNA, 545 bp, Homo sapiens
actcgcacaccagtttcccccaccgcgctttggctagcagcgtaagggatccacttagccatctcggcctccccagtcctaaaggtctaggggacagaaaaaagctgggagtcggaaggttcctcgggtccccggcatggcagacggggctggctcagaggtctgctctgtggacttggaatcgcacccatcctattagtgtgatctcagctcaaggcaaaggtgggatatcatggcatctatctgggttggacaccgaggaacagtaagagattatccagactttagcccatcagtggatgctgaagctattcagaaagcaatcagaggaattggaactgatgagaaaatgctcatcagcattctgactgagaggtcaaatgcacagcggcagctgattgttaaggaatatcaagcagcatatggaaaggagctgaaagatgacttgaagggtgatctctctggccactttgagcatctcatggtggccctagtgactccaccagcagtctttgatgcaaagcagctaaagaaatccatgaagg

SEQ ID NO: 7933 - DNA, 768 bp, Homo sapiens
aacgaggatgccactcagagagaccagagggacaaacaccacagccagtcctgccacagccctgccacaaaaaacctgtgaacttatgaatcaaggcatcttggccctggtcagctccattggctgcacgtcagcaggatccctccagtctttggcagacgccatgcatatcccccacctcttcattcagcgctcaacagctgggaccccaaggagtggctgtggactcacccggagcaacaggaatgatgactacactctctcagttcgcccacctgtctacttgcatgatgttatcctaagagtggtcacagagtatgcctggcagaaattcattatattctatgatagtgaatacgatatccgtggaatacaggagttcttggacaaagtctctcagcagggaatggatgttgcacttcagaaggtagaaaacaacatcaataaaatgattaccactctctttgacaccatgagaatagaagaactgaatcgctatcgagacactcttaggcgagcgatccttgttatgaatcctgctacagccaaatccttcattactgagatgtcgttttagaaaaacacttagggaggaaagaatgtgagtgatttttgttttcatgccagagcacagacacttacgtgacaattggagtaaataaagtaaaaggagcaaatgaaagttgagtgggattcacatagcctgcagtcttcatgatttccacatggaaagagagaattggagctagcatttaaacactaacatac

SEQ ID NO: 7934 - DNA, 440 bp, Homo sapiens
tcatgttcaccacaactgtcctcacctgcattgcttttgttatgccgtttatatacaggggaggctggagtaggcatgcaggttaccacccatacctcggctgtatagtgatgactttggcagttcttcagcctcttctggcagtcttcaggccacctttacatgacccaagaaggcaaatgtttaactggactcattggagtatgggaacagctgctagaataatagcagacttaaaacaatctggaaaatgtgggtgcatctcttttaaggattggtagattacgcagccataaaaaagaatgaagtcatgtcttttgtagcaacatggatgctgctggaagtgattatcctacatgaattaatgcagaaacagaaaatcacataccacatgttctcacttataaattggcagcgatgttcctgggaatggatttacc

SEQ ID NO: 7935 - DNA, 884 bp, Homo sapiens
gggtgaggtgtggagtgtggctggccaccagcctgcaggagggagggctggaaggtggggatatggggaagggctggagaagaagagagaaatacaggacttgaatcacaacttcctctcaacaaggctgttagggccctgggtggtggtgggatcatcagctgggagtggggtgtctgagcgtggctggccatctgcctactgatcccagagctctcagcccagctgaggctgcacatgtggaccttctgcctcctggtacctcctggcccagtcaggctcagtgtctgttgctttccagaaccctggctactacgacatccaggccaaggacctgggcatctggcatgtgcccaacaagtcccccatgcagcattggagaaacagcgccctgctgaggtaccgcaccaacactggcttcctccagagactgggacataatctgtttggcatctaccagaaatacccagtgaaatacagatcagggaaatgttggaatgacaatggcccagccatacctgtggtctatgactttggtgatgctaagaagactgcatcttattactcaccgtatggtcaacgggaatttgttgcaggattcgttcagttccgggtgtttaataacgagagagcagccaacgccctttgtgctgggataaaagttactggctgtaacactgagcatcactgcatcggtggaggagggttcttcccacagggcaaaccccgtcagtgtggggacttctccgcctttgactgggatggatatggaactcacgttaagagcagctgcagtcgggagataacggaggcggctgtactcttgttctatagatgagacagagctctgcggtgtcagggcgagaacccatcttccaaccccg

SEQ ID NO: 7936 - DNA, 405 bp, Homo sapiens
ccctccgaaaatgccatcccgcccactttctacagaccctacttcagaattgttcgatttgacgtctcagcaatggagaagaatgcttccaatttggtgaaagcagagttcagagtctttcgtttgcagaacccaaaagccagagtgcctgaacaacggattgagctatatcagattctcaagtccaaagatttaacatctccaacccagcgctacatcgacagcaaagttgtgaaaacaagagcagaaggcgaatggctctccttcgatgtaactgatgctgttcatgaatggcttcaccataaaggttacaagccactctctcttttcctcccaagatgttcagtatccctaagttactttaaattgattgcagatttaagggtatagacacacatacaaatg

SEQ ID NO: 7937 - DNA, 1910 bp, Homo sapiens
gcggagacgcggagctcgcccaccgcccgccccagcagtggctgcaccatgcacgtgaacggcaaagtggcgctggtgaccggcgcggctcagggcataggcagagcctttgcagaggcgctgctgcttaagggcgccaaggtagcgctggtggattggaatcttgaagcaggtgtacagtgtaaagctgccctggatgagcagtttgaacctcagaagactctgttcatccagtgcgatgtggctgaccagcaacaactgagagacacttttagaaaagttgtagaccactttggaagactggacattttggtcaataatgctggagtgaataatgagaaaaactgggaaaaaactctgcaaattaatttggtttctgttatcagtggaacctatcttggtttggattacatgagtaagcaaaatggaggtgaaggcggcatcattatcaatatgtcatctttagcaggtatctcttctgtatgcagacatttgaaaacctggctggcagaagttctgccgtcttcagcagggagctcccagggttactttagaactgctggattcctttttctctagcagaaagagaagaagaacatggaggaggcatggctactcttttaagaaccccagcccagtaatggcagaccttctgctcacatttcagtatagaacttgagctcatgtttcacctaactgtaagcgagtctgtctgggaaatgcagtctagctgtgtgcctaagagaagaatggatttcagagggcagctaatcatcttttccacagcatgcaatcctaaactatagtattttcagagtagtatgatttagtatcagctgatatcttatccttcaatactagccttaaacctctgactggactttttggagcaactgagtcaagtgactttactttttaaaactctaggaaaaaatcatcaatgattcttgaatagttcaagtgaaattgtgaagtttaagaagtctgatcaacatggacagcaaatctaagctatcttgtccaaaaaagtgagactttaaaaaattatctgtttggttttagttaatgtggtgatttcagaatagaaatttcagccccacaccccaccccaaccttggcatctcagctccagtgatttgggaagttgggtttggaggtacctgtgattgaacctctgtctgattctcagcatttgtctcatccctctaggaatgattatcaaatggttcttttatatcactgtaaagctgccaccagaggagatttagaaatctcctttagaagttctcaaaaatagactagcatctcattttctgggtcgcttaaagtcaaaatcatgtccctaaagctattacaaacctatttctataaatttttcagggtaatcagattctttttcctagtggtacaactacttataaattataacattttaatcctaatgatactttaaaaggtgagcgcacgggcaatatttgaaaggggtatgtgttccagagagggccaaatgttaagctgtgggagactgaaaccctaaaagcaaattggcaaagctaaatctatactattttgaaataaaatcataagaaaaaaacaagtgactggagaattaaaaagagatatttagtattttcttaaaagtttaaatatttaaaaacctggggctgtgatcaagattgataattctctgtattctttcataaagctaagagggtcagcaaagcttggagtaccatgaatattctacaaggagcccctggcctttatgtcactggaggcactgatttcattctttggaaggctgaaagcctcagagttggatcaatttaggacgatctgggagaaattctttaccataagagggtgcttccttgccccaaagagcatgaataaagaaatgcaatgtagaa

SEQ ID NO: 7938 - DNA, 835 bp, Homo sapiens; identical to SEQ ID NO: 6666

SEQ ID NO: 7939 - DNA, 1370 bp, Homo sapiens
gtctccggtgagttttgtggcgggaagcttctgcgctggtgcttagtaaccgactttcctccggactcctgcacgacctgctcctacagccggcgatccactcccggctgttcccccggaggtgagcggccctgtgggcttccccggctccccacccccatcgctagagtgctcgccgcgctagcagcctcgcgttccagggctgggggtgcgccgccgggatcctctctgatcgcccacgccccatctggggtccccattcagccgtcagccctgttttgtcctaaggtggtcctaactaggatccacgtggcccatcccacgcccacaggtgctgagttaggcatccctgccatgccctcccagagcaccttcacgatctccttgctgtcccaacacttagcgtgttgcgtgttaactaccctttgtctataaggtttgcaatgtggccctagtatcttccagggtacctaacacattgcagatattcatggtatgtttgttaaataaatgaacttgatagatttgaccctcatagagttatttggacttgcaaaaagtttgtagttaactccaatctgtgatgtgggagagacttctaggcaggttcctttctccagggcatgttcttatatttcccattacccaccacccccctgcaaaaggactgggcctatttcaggaaggtgactgatgcctgcactgtagcacaggggttgtgtattgtgccttgcaggaacaaaattttcaataaagtaaatgtttgtttgtttgtttttgagacggagttttgcttttgttgcagtgagccgagatcgcactgctgtacccagcctgggccacagtgcaagactccatctcaaaaaaaaaagaaaagaaaaagcctgtttaatgcacaggtgtgagtggattgcttatggctatgagataggttgatctcgcccttaccccggggtctggtgtatgctgtgctttcctcagcagtatggctctgacatctcttagatgtcccaacttcagctgttgggagatggtgatattttcaaccctacttcctaaacatctgtctggggttcctttagtcttgaatgtcttatgctcaattatttggtgttgagcctctcttccacaagagctcctccatgtttggatagcagttgaagaggttgtgtgggtgggctgttgggagtgaggatggagtgttcagtgcccatttctcattttacattttaaagtcgttcctccaacatagtgtgtattggtctgaagggggtggtgggatgccaaagcctgctcaagttatggacattgtggccaccatgtggcttaaatgattttttctaactaataaagtggaatatatatttcta

SEQ ID NO: 7940 - DNA, 1519 bp, Homo sapiens
tttctgttcccgggcggcatcggacccgtcggagagtaaatcccaagtaaggtacctgccgttggcagatttgagctttcttcttggacacctaatacccacagtcctccaggctccggtagattgcaaatgacctgctttctttctgttcccgggtggcatcgacccgtcggagagtaaatcccaagtaaggtacctgccgttggcagatttgagctttcttcttggacacctaatacccacagtcctccagtaaatcccaagcaaggtacctgccgtcagcagatttgagctttcttcttggacacctaatacccacagtcctccaggctccggtagattgcaaatgacctgctttctttctgttcccgggctgcgttcggacccctgtcggatagtaactcccaagtaaggtacctgccgtcggcagattggagctttcttcttggagacctaatacccacagtcctccaggctccggtagattgcaaatgacctgctttctttctgttcccgggctgcgttcggacccctgtcggagagtaaatccgaaaaaaacaaacaaagacatggatttactgtgcatattagcagatccatactggaaaatgcatggaggtttcatatacaccacttacaggtttccaaagccacaatttccttcatatgttcaaactcttcaggatgcagaaaggcagtgaactcctccggagtagctgtcaggtcaccattgaggtctgcagctttgaatcttctctcatcacgtggcagcatctttttaaaggtgtgatgatctgaagaatcatgaaactctgcggggtttcctaggttttcagctcctcagtagtgacaaagccatacccatcattgtcgattcgatcaacaatcttccctagcctctccttgctctcgtccggggtgagctcgtcgaagttcttggagtcctccttgcccaggaaggcctcgtggtcgtactggaagctctggttgtcctcagggggccgctcgcccagctccgagtcgggccgcaccacgcgctctttgcgcaccgtgggcttggcccgcagaacccgcggcgccagcaccagcgccagcagcagccccagggctaaccccaggcggccaccgcgcgccatcgtcccgaggagagggcggccgggagggagacgctgagcgagcgacaacagcggcagctcgggaatgggggctcggagcgcggcggccaagttttatgttatgtatattttacaagtaaaaaaattttttcacctcagcctgaactgaacactagctgacagacgttttgatttctttgaccatcacggaatcgtggccaagcgcggtggctcacatctgtaatcccaacactttgggaggtcaagatgggcggattgcttgaatccaggtgtttgagatcagcctgggcaacatgacaaaaccctgtttctagtaaaaatacaaaaattaaccaggctcaagccatgaccatgcaccattgcactccagcctaggcgacaga

SEQ ID NO: 7941 - DNA, 393 bp, Homo sapiens
gacgcatcgcagcagcagcagcagcagcagaagcagcagcagcagcctccgcaggcatccgtgggcaccgcaaaatggtcctctacaccctgcgggcaccacgaagccccaagatggtgcaagggtctggctgctttgggaggaagatggaccggatcagctcctccagtggcctgggctgcaaagtgctgaggcggcattaagaggaagtcctggctgcagacacctgcttctgattccacaaggggctttttcctcaaccctgtggccgcctttgaagtgactcatttttttaatgtatttatgtatttatttgattgttttatataagatggtttcttacctttgagcacaaaatttccacggtgaaataaagtcaacattataagcttt

SEQ ID NO: 7942 - DNA, 1140 bp, Homo sapiens
ctctaataactgtcctctctctagtctaagttaggcgctgctcctctggtgtaattccacagcacccttgtggtcttcgccgtggagtgctggcactgtgttgtcattcacagtttgactttttgtcttcctcagtagaccacaggctcctgagggccacacatttgctttttgctttgatttctgcagccccatcatttagcacagtacctggcacatagtgtgtcctttaatacatttgtattgaaatgaatgaatgattgaatgaactccaaaaatgccaggctttttgttcttttttgttttggtgttttgcagggatggccagtcaggaaagataaccgtggatgactatggagccagaacaggcaaatccccaggcatgatgcggcagcttaacatcaatggagctctgtatgtgggtggaatgaaggaaattgctctgcacactaacaggcaatatatgagagggctcgtgggctgtatctctcacttcaccctgtccaccgattaccacatttccctcgtggaagatgccgtggatgggaaaaacatcaacacttgtggagccaagtaacaccagctggccttgtccaagggacagagccttctattctgagaatcccaggggccctcagaccctgcctgatgctatatgcagaggcccagggaccaggtgtgtttcctctcaccaagaagaaagtacacactgatgagaaactgagaaccaagacaggcatccctgggtggcctttcctgctgacactccacgagctgacccagcagaattctctgtgtaggaagcatcggactttgtccattgaatatgtagcggctgccagagatcacacatcaatgcaaattccagagcctgtctgctatagctcagtgactgtgttgtgattcatagtacattaaaaagagagagagagagaaagaatcccacagggcactattaaaatacttctctccttccctgactcatgacactcttcctgacagcagaatgactgtgtgaccttgaacttcacatttcccacattggcccttggattgttcggattaaccccttccactcctcactggctggttcactgtgttctgactagtccataaaaataaagatggaaggagatcaaa

SEQ ID NO: 7943 - DNA, 4276 bp, Homo sapiens
gaaaaaaggaacccaaggagataggagagctgttaatttcactcgggacatttcctcgaggctagtttactcggaaagcctcaatgttccctggtagctgcaggatctactttgggggctgccaagtttcctctctcattctttctcctgccccaagagcaggcaggaaggaaagttcctggactgatactcgtctgtttagtaggcgtgggtcctggttgaagtctgtctaggaaaactcctaagtgtagaaatcttcttcgtattaccactgtctctgcactgagatttgggctgctttgcttccagcgtcacacatcataactgagaaagataaaaactctccagatgtcttccagtaatgtcgaagtttttatcccagtgtcacaaggaaacaccaatggcttccccgcgacagcttccaatgacctgaaggcatttactgaaggagctgtgttaagttttcataacatctgctatcgagtaaaactgaagagtggctttctaccttgtcgaaaaccagttgagaaagaaatattatcgaatatcaatgggatcatgaaacctggtctcaacgccatcctgggacccacaggtggaggcaaatcttcgttattagatgtcttagctgcaaggaaagatccaagtggattatctggagatgttctgataaatggagcaccgcgacctgccaatttcaaatgtaattcaggttacgtggtacaagatgatgttgtgatgggcactctgacggtgagagaaaacttacagttctcagcagctcttcggcttgcaacaactatgacgaatcatgaaaaaaacgaacggattaacagggtcattcaagagttaggtctggataaagtggcagactccaaggttggaactcagtttatccgtggtgtgtctggaggagaaagaaaaaggactagtataggaatggagcttatcactgatccttccatcttgttcttggatgagcctacaactggcttagactcaagcacagcaaatgctgtccttttgctcctgaaaaggatgtctaagcagggacgaacaatcatcttctccattcatcagcctcgatattccatcttcaagttgtttgatagcctcaccttattggcctcaggaagacttatgttccacgggcctgctcaggaggccttgggatactttgaatcagctggttatcactgtgaggcctataataaccctgcagacttcttcttggacatcattaatggagattccactgctgtggcattaaacagagaagaagactttaaagccacagagatcatagagccttccaagcaggataagccactcatagaaaaattagcggagatttatgtcaactcctccttctacaaagagacaaaagctgaattacatcaactttccgggggtgagaagaagaagaagatcacagtcttcaaggagatcagctacaccacctccttctgtcatcaactcagatgggtttccaagcgttcattcaaaaacttgctgggtaatccccaggcctctatagctcagatcattgtcacagtcgtactgggactggttataggtgccatttactttgggctaaaaaatgattctactggaatccagaacagagctggggttctcttcttcctgacgaccaaccagtgtttcagcagtgtttcagccgtggaactctttgtggtagagaagaagctcttcatacatgaatacatcagcggatactacagagtgtcatcttatttccttggaaaactgttatctgatttattacccatgaggatgttaccaagtattatatttacctgtatagtgtacttcatgttaggattgaagccaaaggcagatgccttcttcgttatgatgtttacccttatgatggtggcttattcagccagttccatggcactggccatagcagcaggtcagagtgtggtttctgtagcaacacttctcatgaccatctgttttgtgtttatgatggtctgttggtcaatctcacaaccattgcatcttggctgtcatggcttcagtacttcagcattccacgatatggatttacggctttgcagcataatgaatttttgggacaaaacttctgcccaggactcaatgcaacaggaaacaatccttgtaactatgcaacatgtactggcgaagaatatttggtaaagcagggcatcgatctctcaccctggggcttgtggaagaatcacgtggccttggcttgtatgattgttattttcctcacaattgcctacctgaaattgttatttcttaaaaaatattcttaaatttccccttaattcagtatgatttatcctcacataaaaaagaagcactttgattgaagtattcaatcaagtttttttgttgttttctgttcccttgccatcacactgttgcacagcagcaattgttttaaagagatacatttttagaaatcacaacaaactgaattaaacatgaaagaacccaagacatcatgtatcgcatattagttaatctcctcagacagtaaccatggggaagaaatctggtctaatttattaatctaaaaaaggagaattgaattctggaaactcctgacaagttattactgtctctggcatttgtttcctcatctttaaaatgaataggtaggttagtagcccttcagtcttaatactttatgatgctatggtttgccattatttaataaatgacaaatgtattaatgctatactggaaatgtaaaattgaaaatatgttggaaaaaagattctgtcttatagggtaaaaaaagccaccgtgatagaaaaaaaatctttttgataagcacattaaagttaatagaacttactgatattcctgtctagtggtataatatctcaggaatcttggctgagggtttggaactgtgggtagagtagagggccaggagtccagtaatagaattcttgcaccatttctggaacattctagctctgggaggtcacgtaaccttcttggggtagttcagtggtttagtggtttataatccaggtgtgcgtcagaatcatctgaggaactttgctaaaatacaaaaatctggcctaagtagctccagatctaccttcataaaggaatctgaccactcctggatttggtaatttccaagttctgaaaattttacttaggatttaataactattaacatctgtccctacataggttttctttcctacttatataccttatgttctcttcattctaaccttcatcagtaatagggaaatgttttaattttatttttttagttgaagggtaatgtaccaaaaaatatagttcagtgaattaaaatgaacacacatgtgcaaccatcaattcaggtcaagaaatagaagattgtagcacacaaaagcctactcagccattctcccagtcactacttccttccttacccctgggttatttttgaaatgacacttgatgtatttccctctgttgctgttatgagaacattgctacagccaagtgttgtgtttctgtgtgcataggttgatacttaattatctccccactttttaataaacttttaatttggaaataattttagattgacagaaaagttgcaaagatagtgaggaaagttcctgtctactctttgctcagcttcccttaatgttaacattttatatagcaagatgcatttgtcaaagctaacaagttaacattggtacaatcactgttaattaaactgcacacaatattcagatttcaccacttttccactaatattctttcattgttctaggattcaattcaggagaccacatttcatctagccctcttttttaaaagtaaatacttttcagcacttacaggagttaactgagctggggcatcatggtgtatagacgccctgacactggtcatcttggaattcatttagtttgtcagtgggtgccctgacattctgtcacaacatcaatttgggaacatggcattatatttttatctttgaacttttttctttttggatgacatttgattaatgcgtcatcttggaacacattatcttttttcttggttatgtgatcaggaagattaatcagtttttcctgttcttggtataattcctgcttttcacatacctgtcccttacagttctctatatatacccttcccttattacacagagagaaatatctatctatactttttacacaaaatatacttcaaaagaaacaaaacagccacaattattaactttttaaataaatgagaatttaattatatccta

SEQ ID NO: 7944 - DNA, 779 bp, Homo sapiens
aatcacagctccgggcattgggggaacccgagccggctgcgccgggggaatccgtgcgggcgccttccgtcccggtcccatcctcgccgcgctccagcacctctgaagttttgcagcgcccagaaaggaggcgaggaaggagggagtgtgtgagaggagggagcaaaaagctcaccctaaaacatttatttcaaggagaaaagaaaaagggggggcgcaaaaatggctggggcaattatagaaaacatgagcaccaagaagctgtgcattgttggtgggattctgctcgtgttccaaatcatcgcctttctggtgggaggcttgattgcatacccataaatgagactattccaaacataaactctccagggcccacaacggcagtgtcctacatgtcggtgaaatgtgtggatgcccgtaagaaccatcacaagacaaaatggttcgtgccttggggacccaatcattgtgacaagatccgagacattgaagaggcaattccaagggaaattgaagccaatgacatcgtgttttctgttcacattcccctcccccacatggagatgagtccttggttccaattcatgctgtttatcctgcagctggacattgccttcaagctaaacaaccaaatcagagaaaatgcagaagtctccatggacgtttccctggcttaccgtgatgacgcgtttgctgagtggactgaaatggcccatgaaagagtaccacggaaactcaaatgcaccttcacatctcccaagactccagagcatgagggc

SEQ ID NO: 7945 - DNA, 483 bp, Homo sapiens
cctgttgtggcttttgccatgaggaagaggttgactactaacactgcatgtttgatttagcaggtgaagtttttagtatttaattcgctgctgtgcagagcagcaagtgctccgtgcagggctgttgctatcacttggaggtgaacagcctcttttgccggtattcagtgaagaaagcaagtctaaatatgcagttctctcactggagtgaaagatgttttgttcatttctaatcaactatgctagacagctgcaagctgaaaagtgcctgcaatttgccatttatttgtaataagaaaataataaacactgctggaaccagtaatgcagaagtccccttggctgatcccggaatgtaccagctggacattacattaagaaggggtcaaagtttagctgctcgagatcgaggagggacgagtgatccatatgtgaagtttaaaatcggaggaaaagaagtttttagaagtaagataatacaca

SEQ ID NO: 7946 - DNA, 551 bp, Homo sapiens
ggatggggagtggtaagaacctaggatttgaattcccagcctggccaacccttgcagccatgtcttggcctcaagtggaacaagggctccttgaggccagcagggttgggggagttggggtgggcctgagcctctttcctgctagagctcttggtcctccctgcctccaccacccatccctgctctgcagaacccctgggtgctgagtggcaggagccccagggttgtcccatctgggtatggctggctgggtcactaacctctgtgatctgcttccttcctttccagattatgcggatcaaacctcaccaaggccagcacataggagagatgagcttcctacagcacaacaaatgtgaatgcagaccaaagaaagatagagcaagacaagaaaatccctgtgggccttgctcagagcggagaaagcatttgtttgtacaagatccgcagacgtgtaaatgttcctgcaaaaacacagactcgcgttgcaaggcgaggcagcttgagttaaacgaacgtacttgcagatgtgacaagccgaggcggtgagc

SEQ ID NO: 7947 - DNA, 1854 bp, Homo sapiens
gcaggaacagtcctctgtccctatcttttggtgtccggacatggccttggcactgtagcatgtggacagccagtgccatggatttcagaacctgcattgccagttgactgcctgctttgtgctacgtgcaggcctgccgcgccctgatgattgctgcctcggtcctgggtctgccggccattttactgctgctgactgttcttccctgcatccggatgggccaggagcccggtgtggctaagtacaggcgggcccagctggctggtgttttgctcattctgctggctctctgcgcccttgttgccaccatctggttccctgtgtgcgcccaccgtgagaccaccatcgtgagctttggctactccctgtatgcaggctggattggtgctgtgctgtgcctcgtgggtggctgtgtcatcctctgctgcgctggagatgcccaggcctttggtgaaaaccgtttctactacactgcgggctctagctccccgactcatgcgaagagtgcccacgtataagagggctgcccggctgcccacagaggtgctgtagatgctgggcccagggccctaggtttgctcgtcacagtgtggggaagcccattcctctgccaggctctaaagccaaaggtctagaaaagcatcctgtctggcattttgtagtcttaacttctccccatttcccccatcttttggttgccttaaaagaaatctctagctcagataatgcccagacatttttttcccttggtgttgcccctattagctcttttcttgggcattcttttgctgtttattaaaaatatattatatatattttgtttctttaaatttcaaatgttttgcaaacatcactgagttaggtgggggtggggaagagaaatacaagatacttttttttttttttttttttttttttttttaaatagggcctcactctgttgctcaggctggagtgcggtggtgtgatctcggctcatgtagcctcaacctccccggctcaagtgatcctcctgcctcagcctcccaagtagctgggactacaggcgttcactactacacccagctaatttttaagttttttatagagatgagggctccctatgttgcccaggttggtctcgaactcctggactcaaagtatcctcccgcctcggcctcccaaagtgttgggattataggagtgagccaccacaccggccaagatgcttttcaaactgatacagatgacaatgggagcctcataaagatggcttttgtttcttcccttcaaggtcatttacttgtacgagacagaaaaagatagcattggggacatgggatgggggagggagggcaatagtggaacgaactttccatgggaaactttcccttttgtaagttgagggccaggggtagggatattttttagtttgtgattttacatttatctgtacatactttttcaagattgatcatttttataaccatggttttcctgaaatcctcaattcatcaatatgaaggaaatgaaccacatagactttatgcaataaataacagtgcaagtgagtataactctaactgatgttccacaaaacatttttgatttcaggtttgtatgatgtagtttttaatcgtacattttcatatgcttcaaactaacacatttttaaagctttcccccacttttctctctatttgtattgttagccatcttgaagtgatgttgtttaacataaattgtactgttgaatttggctttacgggtgtaaacactgatggtatatcagtatctgagaccccaaactctccaaatactgatggtgcattttattcttgaagtgaaatctgtgcaataaaataacagactgtc

SEQ ID NO: 7948 - DNA, 532 bp, Homo sapiens
ttgaggggtgtgaaggaattggctgtgttctttaaaatacatgtatatttttaaaagtgtgtgtgtgtgtgtgtgtgtgtgtgttcctgagggcctgtgcaagcaactgggctttacgacttgcactttttggaggatctgacccctaccctggagagaattgaagcgacaccaagaaagcattggtgccttgattggactaggaattgctgcccttgttttactcgcctttgtcatcagtgtctgtgtcctttgctatttatttctgtatacgaaacctcaaagattagacactggccttaagcttcaacacttagaggcttcttccactcaagaaggcaagtcaaatggaaaaaccaaagccctcaattcaaatgcagcatcaaatgcaacaaatgaaacatactatgaagctgatgatataattcaagaaaaaacaatggatgcaacacaaatccacattgcttattaactaaaaattctgtgttttaaatgcttactggagagatgggacaataaaaataaagcgtgc

SEQ ID NO: 7949 - DNA, 599 bp, Homo sapiens
catacactctggcaatgaggacactgagctcgcttctgaaatttgacaagataaccactaaaatctctttgaattctatgttgttgtgatcccatggctacagaggatcaggagttgacatagatactctttggatttcataccatgtggaggctttcttacttccacgtgaccttgactgagttttgaatagcgcccaacccaagttcaaaggctgataagagagaaaatctcatgaggaggttttagtctagggaaagtcattcagtggatgtgatcttggctcacaggggacgatgtcaagctcttcctggctccttctcagccttgttgctgtaactgctgctcagtccaccattgaggaacaggccaagacatttttggacaagtttaaccacgaagccgaagacctgttctatcaaagttcacttgcttcttggaattataacaccaatattactgaagagaatgtccaaaacatgaataatgctggggacaaatggtctgcctttttaaaggaacagtccacacttgcccaaatgtatccactacaagaaattcagaatctcacagtcaagcttcagctgcaggctcttcag

SEQ ID NO: 7950 - DNA, 550 bp, Homo sapiens
atatggggggatgcacggtgaagcctcagctgctgctcctggcgctcgtcctccacccctggaatccctgtctgggtgcggactcggagaagccctcgagcatccccacagataaattattagtcataactgtagcaacaaaagaaagtgatggattccatcgatttatgcagtcagccaaatatttcaattatactgtgaagaaagaaggatctgtcagccaagtcttttctacaaataagaggagaacaaggagatacctaggtccttggtcaaggagaagaatggagaggtggtgatggaattaatagtattggagggggccagaaagtgagattaatgaaagaagtcatggaacactatgctgatcaagatgatctggttgtcatgtttactgaatgctttgatgtcatatttgctggtggtccagaagaagttctaaaaaaattccaaaaggcaaaccacaaagtggtctttgcagcagatggaattttgtggccagataaaagactagcagacaagtatcctgttgtgcacattgggaaacgct

SEQ ID NO: 7951 - DNA, 556 bp, Homo sapiens
gtgcccgctcgggctgctgcggctggggcttgcttccttatacccacctctcctcctctgggtctgcgtgtgtatgctcaaggtgtcagccgtactgtgtgtgtgtgcagccgcttggtgcagtcagtctctcgcagctgccgcggcggtggctgcagccggggggcggtcggacggcggtaattttctggatgataaacaatggctcaccacaatctctcagtatgacaaggaagtcggacagtggaacaaattccgagacgatgattatttccgcacttggagtccaggaaaacccttcgatcaggctttagatccagctaaggatccatgcttaaagatgaaatgtagtcgccataaagtatgcattgctcaagattctcagactgcagtctgcattagtcaccggaggcttacacacaggatgaaagaagcaggagtagaccataggcagtggaggggtcccatattatccacctgcaagcagtgcccagtggtctatcccagccctgtttgtggttcagatggtcatacctactcttttcagtgcaaacta

SEQ ID NO: 7952 - DNA, 1955 bp, Homo sapiens
ttttttttgcccttatacctcttcgcctttctgtggttccatccacttcttccccctcctcctcccataaacaactctcctacccctgcacccccaataaataaataaaaggaggagggcaaggggggaggaggaggagtggtgctgcgaggggaaggaaaagggaggcagcgcgagagagccgggcagagtccgaaccgacagccagaagcccgcacgcacctcgcaccatgagatggcgacgcgccccgcgccgctccgggcgtcccggcccccgggcccagcgccccggctccgccgcccgctcgtcgccgccgctgccgctgctgccactactgctgctgctggggaccgcggccctggcgccgggggcggcggccggcaacgaggcggctcccgcgggggcctcggtgtgctactcgtccccgcccagcgtgggatcggtgcaggagctagctcagcgcgccgcggtggtgatcgagggaaaggtgcacccgcagcggcggcagcagggggcactcgacaggaaggcggcggcggcggcgggcgaggcaggggcgtggggcggcgatcgcgagccgccagccgcgggcccacgggcgctggggccgcccgccgaggagccgctgctcgccgccaacgggaccgtgccctcttggcccaccgccccggtgcccagcgccggcgagcccggggaggaggcgccctatctggtgaaggtgcaccaggtgtgggcggtgaaagccgggggcttgaagaaggactcgctgctcaccgtgcgcctggggacctggggccaccccgccttcccctcctgcgggaggctcaaggaggacagcaggtacatcttcttcatggagcccgacgccaacagcaccagccgcgcgccggccgccttccgagcctctttcccccctctggagacgggccggaacctcaagaaggaggtcagccgggtgctgtgcaagcggtgcgccttgcctccccgattgaaagagatgaaaagccaggaatcggctgcaggttccaaactagtccttcggtgtgaaaccagttctgaatactcctctctcagattcaagtggttcaagaatgggaatgaattgaatcgaaaaaacaaaccacaaaatatcaagatacaaaaaaagccagggaagtcagaacttcgcattaacaaagcatcactggctgattctggagagtatatgtgcaaagtgatcagcaaattaggaaatgacagtgcctctgccaatatcaccatcgtggaatcaaacgctacatctacatccaccactgggacaagccatcttgtaaaatgtgcggagaaggagaaaactttctgtgtgaatggaggggagtgcttcatggtgaaagacctttcaaacccctcgagatacttgtgcaagtgcccaaatgagtttactggtgatcgctgccaaaactacgtaatggccagcttctacagtacgtccactccctttctgtctctgcctgaataggagcatgctcagttggtgctgctttcttgttgctgcatctcccctcagattccacctagagctagatgtgtcttaccagatctaatattgactgcctctgcctgtcgcatgagaacattaacaaaagcaattgtattacttcctctgttcgcgactagttggctctgagatactaataggtgtgtgaggctccggatgtttctggaattgatattgaatgatgtgatacaaattgatagtcaatatcaagcagtgaaatatgataataaaggcatttcaaagtctcacttttattgataaaataaaaatcattctactgaacagtccatcttctttatacaatgaccacatcctgaaaagggtgttgctaagctgtaaccgatatgcacttgaaatgatggtaagttaattttgattcagaatgtgttatttgtcacaaataaacataataaaagg

SEQ ID NO: 7953 - DNA, 907 bp, Homo sapiens
tcccagtgaggacagggacacagtactcggccacaccatggggcgcccactgcacctcgtcctgctcagtgcctccctggctggcctcctgctgctcggggaaagtctgttcatccgcagggagcaggccaacaacatcctggcgagggtcacgagggccaattcctttcttgaagagatgaagaaaggacacctcgaaagagagtgcatggaagagacctgctcatacgaagaggcccgcgaggtctttgaggacagcgacaagacgaatgaattctggaataaatacaaagatggcgaccagtgtgagaccagtccttgccagaaccagggcaaatgtaaagacggcctcggggaatacacctgcacctgtttagaaggattcgaaggcaaaaactgtgaattattcacacggaagctctgcagcctggacaacggggactgtgaccagttctgccacgaggaacagaactctgtggtgtgctcctgcgcccgcgggtacaccctggctgacaacggcaaggcctgcattcccacagggccctacccctgtgggaaacagaccctggaacgcaggaagaggtcagtggcccaggccaccagcagcagcggggaggcccctgacagcatcacatggaagccatatgatgcagccgacctggaccccaccgagaaccccttcgacctgcttgacttcaaccagacgcagcctgagaggggcgacaacaacctcaccaggatcgtgggaggccaggaatgcaaggacggggagtgtccctggcaggtaacagtaggatgtcccctcgggcctgctggagagaccacctgtcccgctgtgcacctcggggaggccagcctgacacttggaatagcaatccgggaaggaactgttccgaactaggacaga

SEQ ID NO: 7954 - DNA, 1070 bp, Homo sapiens
ttttgagccacctgacaattcagtccagcacagcaactgaaggaaggcgttccccaacctgctgtcctatgaaggcctctaggtcaccggtgctaaagccctcctttctccaccctccttaagtggaggtaaacgtcccagcaggaagtcaaggctggattggcgctcttcgcgagcaccctgggaacgggagtctgggtcacgggtgctagagccctcccctctcctcccggccggtgtatgggaaattgtccccgcagaaagtaaaggctggccaggccgcccccagcacgtagagggaatgagtcaggctccggctccacactggcacgtagtgggcggatcgcgccggcgctgagtaggaaggagcttcagccgccagcccggaacgcagttagcttttcaagacacttcctgcatctctgacctgttgcacctctgttatcttggcacctctgttatcttagcagcaagcacctgcctcagctgacccttgagccataacccataagctcctgaaaagtacatcaagtctaaagtgaaccagctaactcattaagactggaatcatgagcaacaatggagcagacctaacctttggttacatctcctgttttgtagctatccttttgtttggctcaaattttgtgccacttaaaaaatttgatactggtgatggaatgtttctccagtgggttctttgtgctgccatatggttggttgccttggttgtcaatctgatattacattgtccaaagttttggccttttgcaatgcttgggggctgcatttgggcaacagggaacattgctgttgtcccaattatcaaaaccattggtttaggccttggaatcttaatctggggatcatttaatgccttaactggctgggcaagctcaaggtttggctggtttggattggatgcagaagaagtatcaaatccgctgctaaattacattggagctgggctatcagtagtaagtgctttcatatttttgttcatcaaaagtgaaataccaaataacacgtgttccatggataccactccattaataacagagcatgtgatc

SEQ ID NO: 7955 - DNA, 5482 bp, Homo sapiens
ccggccggaaggcttgcgccagctcaggatgaggacaggctgggcgacccctcgccgcccggcggggctcctcatgctgctcttctggttcttcgatctcgcggagccctctggccgcgcagctaatgaccccttcaccatcgtccatggaaatacgggcaagtgcatcaagccagtgtatggctggatagtagcagacgactgtgatgaaactgaggacaagttatggaagtgggtgtcccagcatcggctctttcatttgcactcccaaaagtgccttggcctcgatattaccaaatcggtaaatgagctgagaatgttcagctgtgactccagtgccatgctgtggtggaaatgtgagcaccactctctgtacggagctgcccggtaccggctggctctgaaggatggacatggcacagcaatctcaaatgcatctgatgtctggaagaaaggaggctcagaggaaagcctttgtgaccagccttatcatgagatctataccagagatgggaactcttatgggagaccttgtgaatttccattcttaattgatgggacctggcatcatgattgcattcttgatgaagatcatagtgggccatggtgtgccaccaccttaaattatgaatatgaccgaaagtggggcatctgcttaaagcctgaaaacggttgtgaagataattgggaaaagaacgagcagtttggaagttgctaccaatttaatactcagacggctctttcttggaaagaagcttatgtttcatgtcagaatcaaggagctgatttactgagcatcaacagtgctgctgaattaacttaccttaaagaaaaagaaggcattgctaagattttctggattggtttaaatcagctatactctgctagaggctgggaatggtcagaccacaaaccattaaactttctcaactgggatccagacaggcccagtgcacctactataggtggctccagctgtgcaagaatggatgctgagtctggtctgtggcagagcttttcctgtgaagctcaactgccctatgtctgcaggaaaccattaaataatacagtggagttaacagatgtctggacatactcagatacccgctgtgatgcaggctggctgccaaataatggattttgctatctgctggtaaatgaaagtaattcctgggataaggcacatgcgaaatgcaaagccttcagtagtgacctaatcagcattcattctctagcagatgtggaggtggttgtcacaaaactccataatgaggatatcaaagaagaagtgtggataggccttaagaacataaacataccaactttatttcagtggtcagatggtactgaagttactctaacatattgggatgagaatgagccaaatgttccctacaataagacgcccaactgtgtttcctacttaggagagctaggtcagtggaaagtccaatcatgtgaggagaaactaaaatatgtatgcaagagaaagggagaaaaactgaatgacgcaagttctgataagatgtgtcctccagatgagggctggaagagacatggagaaacctgttacaagatttatgaggatgaggtcccttttggaacaaactgcaatctgactatcactagcagatttgagcaagaatacctaaatgatttgatgaaaaagtatgataaatctctaagaaaatacttctggactggcctgagagatgtagattcttgtggagagtataactgggcaactgttggtggaagaaggcgggctgtaaccttttccaactggaattttcttgagccagcttccccgggcggctgcgtggctatgtctactggaaagtctgttggaaagtgggaggtgaaggactgcagaagcttcaaagcactttcaatttgcaagaaaatgagtggaccccttgggcctgaagaagcatcccctaagcctgatgacccctgtcctgaaggctggcagagtttccccgcaagtctttcttgttataaggtattccatgcagaaagaattgtaagaaagaggaactgggaagaagctgaacgattctgccaagcccttggagcacacctttctagcttcagccatgtggatgaaataaaggaatttcttcactttttaacggaccagttcagtggccagcattggctgtggattggtttgaataaaaggagcccagatttacaaggatcctggcaatggagtgatcgtacaccagtgtctactattatcatgccaaatgagtttcagcaggattatgacatcagagactgtgctgctgtcaaggtatttcataggccatggcgaagaggctggcatttctatgatgatagagaatttatttatttgaggccttttgcttgtgatacaaaacttgaatgggtgtgccaaattccaaaaggccgtactccaaaaacaccagactggtacaatccagaccgtgctggaattcatggacctccacttataattgaaggaagtgaatattggtttgttgctgatcttcacctaaactatgaagaagccgtcctgtactgtgccagcaatcacagctttcttgcaactataacatcttttgtgggactaaaagccatcaaaaacaaaatagcaaatatatctggtgatggacagaagtggtggataagaattagcgagtggccaatagatgatcattttacatactcacgatatccatggcaccgctttcctgtgacatttggagaggaatgcttgtacatgtctgccaagacttggcttatcgacttaggtaaaccaacagactgtagtaccaagttgcccttcatctgtgaaaaatataatgtttcttcgttagagaaatacagcccagattctgcagctaaagtgcaatgttctgagcaatggattccttttcagaataagtgttttctaaagatcaaacccgtgtctctcacattttctcaagcaagcgatacctgtcactcctatggtggcacccttccttcagtgttgagccagattgaacaagactttattacatccttgcttccggatatggaagctactttatggattggtttgcgctggactgcctatgaaaagataaacaaatggacagataacagagagctgacgtacagtaactttcacccattattggttagtgggaggctgagaataccagaaaatttttttgaggaagagtctcgctaccactgtgccctaatactcaacctccaaaaatcaccgtttactgggacgtggaattttacatcctgcagtgaacgccactttgtgtctctctgtcagaaatattcagaagttaaaagcagacagacgttgcagaatgcttcagaaactgtaaagtatctaaataatctgtacaaaataatcccaaagactctgacttggcacagtgctaaaagggagtgtctgaaaagtaacatgcagctggtgagcatcacggacccttaccagcaggcattcctcagtgtgcaggcgctccttcacaactcttccttatggatcggactcttcagtcaagatgatgaactcaactttggttggtcagatgggaaacgtcttcattttagtcgctgggctgaaactaatgggcaactcgaagactgtgtagtattagacactgatggattctggaaaacagttgattgcaatgacaatcaaccaggtgctatttgctactattcaggaaatgagactgaaaaagaggtcaaaccagttgacagtgttaaatgtccatctcctgttctaaatactccgtggataccatttcagaactgttgctacaatttcataataacaaagaataggcatatggcaacaacacaggatgaagttcatactaaatgccagaaactgaatccaaaatcacatattctgagtattcgagatgaaaaggagaataactttgttcttgagcaactgctgtacttcaattatatggcttcatgggtcatgttaggaataacttatagaaataagtctcttatgtggtttgataagaccccactgtcatatacacattggagagcaggaagaccaactataaaaaatgagaagtttttggctggtttaagtactgacggcttctgggatattcaaacctttaaagttattgaagaagcagtttattttcaccagcacagcattcttgcttgtaaaattgaaatggttgactacaaagaagaatataatactacactgccacagtttatgccatatgaagatggtatttacagtgttattcaaaaaaaggtaacatggtatgaagcattaaacatgtgttctcaaagtggaggtcacttggcaagcgttcacaaccaaaatggccagctctttctggaagatattgtaaaacgtgatggatttccactatgggttgggctctcaagtcatgatggaagtgaatcaagttttgaatggtctgatggtagtacatttgactatatcccatggaaaggccaaacatctcctggaaattgtgttctcttggatccaaaaggaacttggaaacatgaaaaatgcaactctgttaaggatggtgctatttgttataaacctacaaaatctaaaaagctgtcccgtcttacatattcatcaagatgtccagcagcaaaagagaatgggtcacggtggatccagtacaagggtcactgttacaagtctgatcaggcattgcacagtttttcagaggccaaaaaattgtgttcaaaacatgatcactctgcaactatcgtttccataaaagatgaagatgagaataaatttgtgagcagactgatgagggaaaataataacattaccatgagagtttggcttggattatctcaacattctgttgactgtccttcatctacttggattcagttccaagacagttgttacatttttctccaagaagccatcaaagtagaaagcatagaggatgtcagaaatcagtgtactgaccatggagcggacatgataagcatacataatgaagaagaaaatgcttttatactggatactttgaaaaagcaatggaaaggcccagatgatatcctactaggcatgttttatgacacagatgatgcgagtttcaagtggtttgataattcaaatatgacatttgataagtggacagaccaagatgatgatgaggatttagttgacacctgtgcttttctgcacatcaagacaggtgaatggaaaaaaggaaattgtgaagtttcttctgtggaaggaacactatgcaaaacagctatcccatacaaaaggaaatatttatcagataaccacattttaatatcagcattggtgattgctagcacggtaattttgacagttttgggagcaatcatttggttcctgtacaaaaaacattctgattctcgtttcaccacagttttttcaaccgcaccccaatcaccttataatgaagactgtgttttggtagttggagaagaaaatgaatatcctgttcaatttgactaa

SEQ ID NO: 7956 - DNA, 4752 bp, Homo sapiens
atgcgcggcgttggctggcagatgctgtccctgtcgctggggttagtgctggcgatcctgaacaaggtggcaccgcaggcgtgcccggcgcagtgctcttgctcgggcagcacagtggactgtcacgggctggcgctgcgcagcgtgcccaggaatatcccccgcaacaccgagagactggatttaaatggaaataacatcacaagaattacgaagacagattttgctggtcttagacatctaagagttcttcagcttatggagaataagattagcaccattgaaagaggagcattccaggatcttaaagaactagagagactgcgtttaaacagaaatcaccttcagctgtttcctgagttgctgtttcttgggactgcgaagctatacaggcttgatctcagtgaaaaccaaattcaggcaatcccaaggaaagctttccgtggggcagttgacataaaaaatttgcaactggattacaaccagatcagctgtattgaagatggggcattcagggctctccgggacctggaagtgctcactctcaacaataacaacattactagactttctgtggcaagtttcaaccatatgcctaaacttaggacttttcgactgcattcaaacaacctgtattgtgactgccacctggcctggctctccgactggcttcgccaaaggcctcgggttggtctgtacactcagtgtatgggcccctcccacctgagaggccataatgtagccgaggttcaaaaacgagaatttgtctgcagtgatgaggaagaaggtcaccagtcatttatggctccttcttgtagtgttttgcactgccctgccgcctgtacctgtagcaacaatatcgtagactgtcgtgggaaaggtctcactgagatccccacaaatcttccagagaccatcacagaaatacgtttggaacagaacacaatcaaagtcatccctcctggagctttctcaccatataaaaagcttagacgaattgacctgagcaataatcagatctctgaacttgcaccagatgctttccaaggactacgctctctgaattcacttgtcctctatggaaataaaatcacagaactccccaaaagtttatttgaaggactgttttccttacagctcctattattgaatgccaacaagataaactgccttcgggtagatgcttttcaggatctccacaacttgaaccttctctccctatatgacaacaagcttcagaccatcgccaaggggaccttttcacctcttcgggccattcaaactatgcatttggcccagaacccctttatttgtgactgccatctcaagtggctagcggattatctccataccaacccgattgagaccagtggtgcccgttgcaccagcccccgccgcctggcaaacaaaagaattggacagatcaaaagcaagaaattccgttgttcaggtacagaagattatcgatcaaaattaagtggagactgctttgcggatctggcttgccctgaaaagtgtcgctgtgaaggaaccacagtagattgctctaatcaaaagctcaacaaaatcccggagcacattccccagtacactgcagagttgcgtctcaataataatgaatttaccgtgttggaagccacaggaatctttaagaaacttcctcaattacgtaaaataaactttagcaacaataagatcacagatattgaggagggagcatttgaaggagcatctggtgtaaatgaaatacttcttacgagtaatcgtttggaaaatgtgcagcataagatgttcaagggattggaaagcctcaaaactttgatgttgagaagcaatcgaataacctgtgtggggaatgacagtttcataggactcagttctgtgcgtttgctttctttgtatgataatcaaattactacagttgcaccaggggcatttgatactctccattctttatctactctaaacctcttggccaatccttttaactgtaactgctacctggcttggttgggagagtggctgagaaagaagagaattgtcacgggaaatcctagatgtcaaaaaccatacttcctgaaagaaatacccatccaggatgtggccattcaggacttcacttgtgatgacggaaatgatgacaatagttgctccccactttctcgctgtcctactgaatgtacttgcttggatacagtcgtccgatgtagcaacaagggtttgaaggtcttgccgaaaggtattccaagagatgtcacagagttgtatctggatggaaaccaatttacactggttcccaaggaactctccaactacaaacatttaacacttatagacttaagtaacaacagaataagcacgctttctaatcagagcttcagcaacatgacccagctcctcaccttaattcttagttacaaccgtctgagatgtattcctcctcgcacctttgatggattaaagtctcttcgattactttctctacatggaaatgacatttctgttgtgcctgaaggtgctttcaatgatctttctgcattatcacatctagcaattggagccaaccctctttactgtgattgtaacatgcagtggttatccgactgggtgaagtcggaatataaggagcctggaattgctcgttgtgctggtcctggagaaatggcagataaacttttactcacaactccctccaaaaaatttacctgtcaaggtcctgtggatgtcaatattctagctaagtgtaacccctgcctatcaaatccgtgtaaaaatgatggcacatgtaatagtgatccagttgacttttaccgatgcacctgtccatatggtttcaaggggcaggactgtgatgtcccaattcatgcctgcatcagtaacccatgtaaacatggaggaacttgccacttaaaggaaggagaagaagatggattctggtgtatttgtgctgatggatttgaaggagaaaattgtgaagtcaacgttgatgattgtgaagataatgactgtgaaaataattctacatgtgtcgatggcattaataactacacatgcctttgcccacctgagtatacaggtgagttgtgtgaggagaagctggacttctgtgcccaggacctgaacccctgccagcacgattcaaagtgcatcctaactccaaagggattcaaatgtgactgcacaccagggtacgtaggtgaacactgcgacatcgattttgacgactgccaagacaacaagtgtaaaaacggagcccactgcacagatgcagtgaacggctatacgtgcatatgccccgaaggttacagtggcttgttctgtgagttttctccacccatggtcctccctcgtaccagcccctgtgataattttgattgtcagaatggagctcagtgtatcgtcagaataaatgagccaatatgtcagtgtttgcctggctatcagggagaaaagtgtgaaaaattggttagtgtgaattttataaacaaagagtcttatcttcagattccttcagccaaggttcggcctcagacgaacataacacttcagattgccacagatgaagacagcggaatcctcctgtataagggtgacaaagaccatatcgcggtagaactctatcgggggcgtgttcgtgccagctatgacaccggctctcatccagcttctgccatttacagtgtggagacaatcaatgatggaaacttccacattgtggaactacttgccttggatcagagtctctctttgtccgtggatggtgggaaccccaaaatcatcactaacttgtcaaagcagtccactctgaattttgactctccactctatgtaggaggcatgccagggaagagtaacgtggcatctctgcgccaggcccctgggcagaacggaaccagcttccacggctgcatccggaacctttacatcaacagtgagctgcaggacttccagaaggtgccgatgcaaacaggcattttgcctggctgtgagccatgccacaagaaggtgtgtgcccatggcacatgccagcccagcagccaggcaggcttcacctgcgagtgccaggaaggatggatggggcccctctgtgaccaacggaccaatgacccttgccttggaaataaatgcgtacatggcacctgcttgcccatcaatgcgttctcctacagctgtaagtgcttggagggccatggaggtgtcctctgtgatgaagaggaggatctgtttaacccatgccaggcgatcaagtgcaagcatgggaagtgcaggctttcaggtctggggcagccctactgtgaatgcagcagtggatacacgggggacagctgtgatcgagaaatctcttgtcgaggggaaaggataagagattattaccaaaagcagcagggctatgctgcttgccaaacaaccaagaaggtgtcccgattagagtgcagaggtgggtgtgcaggagggcagtgctgtggaccgctgaggagcaagcggcggaaatactctttcgaatgcactgacggctcctcctttgtggacgaggttgagaaagtggtgaagtgcggctgtacgaggtgtgtgtcctaaacacactcccggcagctctgtctttggaaaaggttgtatacttcttgaccgtgtgggactaatgaatgcttcatagtggaaatatttgaaatatattgtaaaatacagaacagacttatttttattatgagaataaagactttttttctgcatttggaaaaaaaaaaaaagaaa

SEQ ID NO: 7957 - DNA, 560 bp, Homo sapiens
ctgattaaagttgcaccttttgttcccccaggggccttcatacctcggtgtaatgaggagggctattacaaagccacacagtgccacggcagcacggggcagtgctggtgtgtggacaaatatgggaatgagttggctggctccaggaaacagggtgctgtgagctgtgaagaggagcaggaaacctcaggggattttggcagtggtgggtccgtggtcctgctggatgacctagaatatgaacgggagctgggaccaaaggacaaagaggggaagctgagggtgcacacccgagccgtgacagaggatgatgaggatgaggatgatgacaaagaggatgaggtcgggtacatatggtagtgcccacaagaaagaggacacaagttttgcacaaaattgcaagtcacttcctattcctgcatttgtatctaagactccaaggcaccaaggtctcttctccattgttgctctctatacccgacctaaggtttggaagacaactgcttgttcccagaggattctgattttgcatatgtttgtatgggagaaagggtgttgtg

SEQ ID NO: 7958 - DNA, 4257 bp, Homo sapiens
cgattttgctctaaactgctgcatctgtctatgccaaactaatcaataccgattgcaccaccaaactccattgcaaattcagctgtgaggagattccctttcagacaactttgctgaaagcagcttggaaattcggtgtcgaagggtctgccacgttttcatgcttgcattttgggctccaaattggcactgggaaggggttactgagagcacaaggctgataccaggccctacttttaaacgttcatctacttacaatcctagtatttctctaaaaaccaaaacctctttgaattaacagtttcatgctgtgaatttctagtgggagatcttttccttgatattgacgacacaattttccatgtacttttaaagcagggagtggggaaaagtattttgaggggacattttcatcatcagttcagctttttttttttggttgttgctcttttttgggggggttgggtttgttggtttcactgaaacatttaactacctgtaaaatctaaacatggctgttagtgtcacaccaattcgggacacaaaatggctaacactggaagtatgtagagagttccagagggggacttgctcacggccagacacggaatgtaaatttgcacatccttcgaaaagctgccaagttgaaaatggacgagtaatcgcctgctttgattcattgaaaggccgttgctccagggagaactgcaaatatcttcatccacccccacatttaaaaacgcagttggagataaatggacgcaataacttgattcagcagaagaacatggccatgttggcccagcaaatgcaactagccaatgccatgatgcctggtgccccattacaacccgtggtatgtcgagagtaccaacgtggcaattgcaaccgaggagaaaatgattgtcggtttgctcatcctgctgacagcacaatgattgacaccaatgacaacacagtcactgtgtgtatggattacatcaaagggagatgctctcgggaaaagtgcaaatactttcatccccctgcacatttgcaagccaagatcaaggctgcccaataccaggtcaaccaggctgcagctgcacaggctgcagccaccgcagctgccatgggaattcctcaagctgtacttcccccattaccaaagaggcctgctcttgaaaaaaccaacggtgccaccgcagtctttaacactggtattttccaataccaacaggctctagccaacatgcagttacaacagcatacagcatttctcccaccagttcccatggtgcacggtgctacgccagccactgtgtccgcagcaacaacatctgccacaagtgttcccttcgctgcaacagccacagccaaccagatacccataatatctgccgaacatctgactagccacaagtatgttacccagatgtagaattttcatcactaaacaatcatgctaaagaggaaaggacagtgtgcttggttagagtaaaggacgaggtcattagccatattgtatatatcgtcaagcaacacacacaaaagttcctcagccacaagacatccacatattgcatgttaaccagaagaaaagacaacattttccggaaatccactgcacactgttgcctatacactttgtacatttaattgatatttgtgctgaggtgatattcctgtctaaaagaacaacattgtctttcttttctagcacagagttatgcattcaaagatgcatacctagttagtttcctatatattcatgccatcttgaaaagacagactatggtgtaaccatgattctattatgtattggtacgtctgtagaccaagatataattttttaaaaataagtttatttctttcaaggtttacaaataacaaaggtgcaccttgtatttaaaattgccattatagatgagagcgtgcatgcacagtcatttttgtttaagagtaatatttttaatgtaatagattgtaagacgtggtgagggagggatctgacagagatgaatgtgccaagcaaaaccacaactgtgtatattttaaagcacatcatggctttaagtaccatgttgttaaggattctcatgaagtgccatagactgtacatcaaattagagtattatttcttcagtgttattgttttcagagccacattttgttgcatatttgctagtactaatcagtcaaagggcaccattctttttttttttttttgaaaccaaagctgtctcagaaatggccaatttaactttacagtaacaatagacagcacaacacaaactctctcaatacagataaactcacacatactggagatatatatataatagatatatataaaattattttaatgcattgtagtgtaatatttatgcatactatactgtataacatgttattcaaaagggattgccatttctgagacacagtaacaaaaaaatgaggaaattattttgcttctatttatagcctctgtcaaaagtcaaaagactataaatgctttgcaaaaatggtttcacgtttgcttaaatgcttcatcacagtcacattcaaaatagtgactctaaacaaagaagaaagcagcactgtcatcagatgcatgataaaccaaaatatgaaaatgggaaatgtttaattaacctagtaattgggtgggttaagtacatgggtgaattttatatgtgatttttgttttgttttgttttgttcagattaactgcttatagccttagaaagccttttacaaaattaaaaaaaaaatagatgtgcattcagtttttaagaatggaatcatccaaaggaattcctttttttgaggtttggatgttgcagctagtaaaggatatttttgctctgttcagcagttctaaaaattgctgaagtaggggccaggtcactggtagttatagtatggaatgggagaagtgaaagttcagttatagaactttccatacttccaagtttactgcaagtttttatgcttgagagagatgctttctaatataagactgatgtgttgattttactgattgtactgtacatctattaaagccttagattattacattacgggttggaacccataccaatgtaatttcaatcgtgttaagaaagtaatggtgacttcacatgttattgtagttagttacattatagaatattacttatttttcttgttaaaatgtagtttttcatttcctacatttattagattttcattttctattaacaattgaataccatttcagtttatagacttgttttattagattttaccaatgaatttttcaaaatacaaaaaaaagtagtttttccttcataacatactcagttttgaattacatgtagtgtcacatgaatattcgtattgttaactaaatgatttatattttactgatttaatattacagtgtaagaatgtcagtcattgttagttcttgtctagttttcattaaaagaacaaagatcttttatatggatatcttataaatatataatcattgctaagtaagaagttaagttgttgctatcgcaacaatcctggcagacaattgagtaatattttgatgatttattttgtttgtaattagttattataagaagatctagatcctagatattagaataaaatttattttctactgtatccatttcaaatgttaaaatattgtttaatatttttgaaatccctgagtatcaggccttgttataaataagctgcataatcaataaatagaacaagggactttttgttgataatccaaatactcaaagtttacgtaatgaaaattatagcgtgtgtgcaaactcttgagggttgattatgctgcaatttagcatgttggaacgtctagggagaaggttgactttttgcacttctgtatatagtcaaaagagagaaacctgtataatagtaagatcttattttgaataaaaacgtctataattacaaggagttttgttaaggctaatacaatgacagactgagcaaaattgcttgcaaaagtggcacagagttagcactccataccccttcaaacatgttgctttgctttcttgtggacagcttgtagtttgccaggattttttcagctggaaagatacgccatcctttcaaaccctcatgactgacaaaaactccatggggccaaatctgcctgaagatcattaccaaaaatagcaggtacttctaccattaaggtgaaatcatggatcagatattccttacatttttcaaaactactgcatgtttaaaacttcaac

SEQ ID NO: 7959 - DNA, 448 bp, Homo sapiens
aacctgggatgagatcctcgtttcagaaaatgatttgatcctcctgaaggcgctccctgctaaggatctaaactcaggagacgggatttcaccatgtttgccaggctggtcttgaactcctgacctgaagtgatctgcccacctcagcctcccaaagtgttgggattacagagcatctctcagggattcttaaaataaaataagtcactgtgaatacacaaaggaaatgaaaacatatacagagtgtgaaataacagccaaaaaggctagtgcaaatcttcaggggccgtccaggactacagagctgtttcaccctaccttggcttcaatctcttcccccatgctcgaaggtgcggagctgtacttcaacgtggaccatggctacctggagggcctggttcgaggatgcaaggccagcctcctgacccagcaagactatatcaacctg

SEQ ID NO: 7960 - DNA, 4125 bp, Homo sapiens
gagcggcggcggcggggcgctggggcggagactgcgacccggagccgcccggactgacggagcccactgcggtgcgggcgttggcgcgggcacggaggacccgggcaggcatcgcaagcgaccccgagcggagccccggagccatggccctgagcgagctggcgctggtccgctggctgcaggagagccgccgctcgcggaagctcatcctgttcatcgtgttcctggcgctgctgctggacaacatgctgctcactgtcgtggtccccatcatcccaagttatctgtacagcattaagcatgagaagaatgctacagaaatccagacggccaggccagtgcacactgcctccatctcagacagcttccagagcatcttctcctattatgataactcgactatggtcaccgggaatgctaccagagacctgacacttcatcagaccgccacacagcacatggtgaccaacgcgtccgctgttccttccgactgtcccagtgaagacaaagacctcctgaatgaaaacgtgcaagttggtctgttgtttgcctcgaaagccaccgtccagctcatcaccaaccctttcataggactactgaccaacagaattggctatccaattcccatatttgcgggattctgcatcatgtttgtctcaacaattatgtttgccttctccagcagctatgccttcctgctgattgccaggtcgctgcagggcatcggctcgtcctgctcctctgtggctggtaggtgtggaatgcctgagtgagttcgtgaggggccccttgcagagtgagctggactcattcagggaattcaggtattggtggtggttggggtgctggggattcttggagaaggcacccactttcctcttgggttctgcttggtcttacattttagtgaatctgacaggtttgggaagatcacaaggctggctggagagggaaggcgagtcacgcattattcttttgctgttccccggagctggcctgttgactatttctttccctgtgtagggatgggcatgcttgccagtgtctacacagatgatgaagagagaggcaacgtcatgggaatcgccttgggaggcctggccatgggggtcttagtgggcccccccttcgggagtgtgctctatgagtttgtggggaagacggctccgttcctggtgctggccgccctggtactcttggatggagctattcagctctttgtgctccagccgtcccgggtgcagccagagagtcagaaggggacacccctaaccacgctgctgaaggacccgtacatcctcattgctgcaggctccatctgctttgcaaacatgggcatcgccatgctggagccagccctgcccatctggatgatggagaccatgtgttcccgaaagtggcagctgggcgttgccttcttgccagctagtatctcttatctcattggaaccaatatttttgggatacttgcacacaaaatggggaggtggctttgtgctcttctgggaatgataattgttggagtcagcattttatgtattccatttgcaaaaaacatttatggactcatagctccgaactttggagttggttttgcaattggaatggtggattcgtcaatgatgcctatcatgggctacctcgtagacctgcggcacgtgtccgtctatgggagtgtgtacgccattgcggatgtggcattttgtatggggtatgctataggtccttctgctggtggtgctattgcaaaggcaattggatttccatggctcatgacaattattgggataattgatattctttttgcccctctctgcttttttcttcgaagtccacctgccaaagaagaaaaaatggctattctcatggatcacaactgccctattaaaacaaaaatgtacactcagaataatatccagtcatatccgataggtgaagatgaagaatctgaaagtgactgagatgagatcctcaaaaatcatcaaagtgtttaattgtataaaacagtgtttccagtgacacaactcatccagaactgtcttagtcataccatccatccctggtgaaagagtaaaaccaaaggttattatttcctttccatggttatggtcgattgccaacagccttataaagaaaaagaagcttttctaggggtttgtataaatagtgttgaaactttattttatgtatttaattttattaaatatcatacaatatattttgatgaaataggtattgtgtaaatctataaatatttgaatccaaaccaaatataattttttaacttacattaacaaacatttgggcaaaaatcatattggtaatgagtgtttaaaattaaagcacacattatctctgagactcttccaacaaagagaaactagaatgaagtctgaaaaacagaatcaagtaagacagcatgttatatagtgacactgaatgttatttaacttgtagttactatcaatatatttatgcgttaaacagctagttctctcaagtgtagaggacaagaacttgtgtcagttatcttttgaatccataaatcttagctggcattagttttctatgtaatcacctacctagagagagttgtaaattatatgttaacatgttatctggttggcagcaaacactaaagccaataaaggaaaaacagtaaatgttccgaaagcagagaaaagcaaccaaacatattgttatgaactaaaagctttccctttaagatgcatacttgtcttactggatgaagaaaattgagggtacatgtaccttatactgtcaaggttgtttaaacatgataaggttaatcgccatctacttcaagttttagaaaaggaaacaagaagctgaaaacagctgctctgactttaatatctgactatatctttgatctgtttgcaggtcatccaagtgttttctaggaatatatttattttaggttgtctgaaactactattttttagactcctgaaagttgttcacatcaatgtgaagacaaattttaaatgaaaatgaagaatgaaattatgtcttgaatcatatattaagaagtaaaaataatagtgatcaggcagaaaagaaaaatggaacatctaaaaatgtatgtgctaactatatcatccagtgtgcagtgttgtgtatttttctaagcatgacaacattgatgtgccttttcagtgtaacagcaaatactgttagtgaacattgtcaatttatgtcattttgttaagagatatgactggagtgtgcagtgtggaatgtctctaatactacttgtgaatcctgcagttctataatcataaacaaaaattacttagtttcgttaagctaagattgtgtttgtgttaacttcgacatcaaggagcaaagaactttagaacagactcctcaatcttgtgactttcttattctctaggaaagtaacacttcgtttcatgaagcttttctgtggggcttcgattatttcaagtctggtttctaagtgcagtgtgtttgaagcaaacgaacttccaactcacttatttggcattgggcaacttggccaagtctgccactttggaagatggctctggaggaaactctcatatggctaaaaaggcaggctagtttcttacttctacaggggtagagccttaaaaaagaacgtgctacaaattggttctctttgagggtttctggttctccctgcccccaataccatatactttattgcaattttatttttgcctttacggctctgtgtctttctgcaagaaggcctggcaaaggtatgcctgctgttggtccctcgggataagataaaatataaataaaaccttcagaactgttttggagcaaaagatagcttgtacttggggaaaaaaattctaagttcttttatatgactaatattcttggttagcaagactggaaagaggtgtttttttaaaatgtacataccagaacaaagaacatacagctctctgaacatttattttttgaacagaggtggtttttatgtttggacctggtaatacagatacaaaaactttaatgaggtagcaatgaatattcaactgtttgactgctaagtgtatctgtccatattttagcaagtttacttaataaatcttctgaaccatg

SEQ ID NO: 7961 - DNA, 994 bp, Homo sapiens
agcccagttggctggaccaatggatggagagaatcactcagtggtatctgagtttttgtttctgggactcactcattcatgggagatccagctcctcctcctagtgttttcctctgtgctctatgtggcaagcattactggaaacatcctcattgtgttttctgtgaccactgaccctcacttacactcccccatgtactttctactggccagtctctccttcattgacttaggagcctgctctgtcacttctcccaagatgatttatgacctgttcagaaagtgcaaagtcatctcctttggaggctgcatcgctcaaatcttcttcatccacgtcattggtggtgtggagatggtgctgctcatagccatggcctttgacagttatgtggccctattaagccccgccactatctgaccattatgagcccaagaatgtgcctttcatttctggctgttgcctggacccttggtgtcagtcactccctgttccaactggcatttcttgttaatttacccttctgtggccctaatgtgttggacagcttctactgtgaccttcctcggcttctcagactagcctgtaccgacacctacagattgcagttcatggtcactgttaacagtgggtttatctgtgtgggtactttcttcatacttctaatctcctacatcttcatcctgtttactgtttggaaacattcctcaggtggttcatccaaggccctttccactctttcagctcacagcacagcggtccttttgttctttggtccacccatgtttgtgtatacatggccacaccctaattcacagatggacaagtttctggctatttttgatgcagttctcactccttttctgaatccagttgtctatacattcaggaataaggagatgaaggcagcaataaagagagtatgcaaacagctagtgatttacaagaagatctcataaatgatacaataagcccttctcgttaaacatgatatgg

SEQ ID NO: 7962 - DNA, 1032 bp, Homo sapiens
atggaaaccctttgcctcagggcatccttttggctggcactggttggatgtgtaatcagtgataatcctgagagatacagcacaaatctaagcaatcatgtggatgatttcaccacttttcgtggcacagagctcagcttcctggttaccactcatcaacccactaatttggtcctacccagcaatggctcaatgcacaactattgcccacagcagactaaaattacttcagctttcaaatacattaacactgtgatatcttgtactattttcatcgtgggaatggtggggaatgcaactctgctcaggatcatttaccagaacaaatgtatgaggaatggccccaacgcgctgatagccagtcttgcccttggagaccttatctatgtggtcattgatctccctatcaatgtatttaagttctaccaagatgtaaaggactggtggctcttcgggttctatttctgtatgcccttggtgtgcactgcgatcttctacaccctcatgacttgtgagatgttgaacagaaggaatggcagcttgagaattgccctcagtgaacatcttaagcagcgtcgagaagtggcaaaaacagttttctgcttggttgtaatttttgctctttgctggttccctcttcatttaagccgtatattgaagaaaactgtgtataacgagatggacaagaaccgatgtgaattacttagtttcttactgctcatggattacatcggtattaacttggcaaccatgaattcatgtataaaccccatagctctgtattttgtgagcaagaaatttaaaaattgtttccagtcatgcctctgctgctgctgttaccagtccaaaagtctgatgacctcggtccccatgaacggaacaagcatccagtggaagaaccacgatcaaaacaaccacaacacagaccggagcagccataaggacagcatgaactgaccacccttagaagcactcctcggtactcccataatcctctcggagaaaaaaatcacaaggcaactgtgagtccgg

SEQ ID NO: 7963 - DNA, 263 bp, Homo sapiens
taccaacatgaagctgctcgcagcaactgtgctactcctcaccatctgcagccttgaaggtcttactttgaaaagtcaaaggagcagctgacacccctgatcaagaaggctggaacggaactggttaacttcttgagctatttcgtggaacttggaacacagcctgccacccagtgaagtgtccagaccattgtcttccaaccccagctggcctctagaacacccactggccagtcctagagctcctgtccctacccactctt

SEQ ID NO: 7964 - DNA, 311 bp, Homo sapiens
ctctatgggcgtagagagaagatggatgacaaactatctgaggctatggcagctgggagtggagaagatatactgaagccatggcttcagacagtttgtcatctcctaattcctttgaagaatcatctgccattgacttcctgttcccagatttctggctcaatcctggaagagtaattcttcatctaaagccacgacaatgagtgaaaatgatttcaagcacacaaaatcctttataatttaaagactccactttagagatacaccaaagccaccgttgttacacaagttattaaactattataaaactc

SEQ ID NO: 7965 - DNA, 566 bp, Homo sapiens
cccttttcatgagatgcagagcctggagaggagcggagccggcaggagcagcatgttgcagccgctattctaggggcgctgggtgaagtgggctgccctctgccaccctctcccaggtgccaggaggaggtggctgactctatcactcagggcctcaccgaaccatgcccagctggggcccgcaccagccacaccttcccagctgcgctgcccaccgccaggtgatgctgacactgctggttcagggaccacgcttggagaaccactacactagggcaagcaggaagagagtcctccttctggaactgaagcaggcagtgtgaagacccatgtggaacaccttaacccgaagcctctctgaccatccagttggcaaagaccctcaggccatgaggactggccaaagacagtgagaggacgtgcaagggtaaattcctgagccccgcagtcttatttcctgccctgacgtccctgcataccagcccaagggttaaccgtaagctgatgcctgtatggcggccttactgatgccacgcaggaacaaagggatgaggactcgactggga

SEQ ID NO: 7966 - DNA, 848 bp, Homo sapiens
cttgaatgcagttgatcaagttgctgttagcatgtaaaataagtttctttgttttgctgatagtctagttctccaaagagctttttcaatctttatcaatctttaaagttaaatagctttcctaatagtcctttgaaaggatgattgtatttatatgttaatgaagctcaggtacctgacaatgatgagcagtttgtaccagactatcaggctgaaagtttggcttttcatggcctgccactgaaaatcaagaaagaaccccacagtccatgttcagaaatcagctctgcctgcagtcaagaacagccctttaaattcagctatggagaaaagtgcctgtacaatgtcagtgcctatgatcagaagccacaagtgggaatgaggccctccaacccccccacaccatccagcacgccagtgtccccactgcatcatgcatctccaaactcaactcatacaccgaaacctgaccgggccttcccagctcacctccctccatcgcagtccataccagatagcagctaccccatggaccacagatttcgccgccagctttctgaaccctgtaactcctttcctcctttgccgacgatgccaagggaaggacgtcctatgtaccaacgccagatgtctgagccaaacatccccttcccaccacaaggctttaagcaggagtaccacgacccagtgtatgaacacaacaccatggttggcagtgcggccagccaaagctttccccctcctctgatgattaaacaggaacccagagattttgcatatgactcagaagtgcctagctgccactccatttatatgaggcaagaaggcttcctggctcatcccagcag

SEQ ID NO: 7967 - DNA, 567 bp, Homo sapiens
atcttagaatcagtggctccttgggggaactcttctgaaatagctattgatataccctctatttagatacactgcatttctctccctaaaagctatagctccctaaaagcaagctgtagacttgcattaatggcatccttttcatcttcaaacccacttgtgaatttgtttcttttctctactaggagcagatccctgcttatatcaaaacggaggctgtgaacatatttgcaaaaagaggcttggaactgcttggtgttcgtgtcgtgaaggttttatgaaagcctcagatgggaaaacgtgtctggctctggatggtcatcagctgttggcaggtggtgaagttgatctaaagaaccaagtaacaccattggacatcttgtccaagactagagtgtcagaagataacattacagaatctcaacacatgctagtggctgaaatcatggtgtcagatcaagatgactgtgctcctgtgggatgcagcatgtatgctcggtgtatttcagagggagaggatgccacatgtcagtgtttgaaaggatttgctggggatggaaaactatg

SEQ ID NO: 7968 - DNA, 4145 bp, Homo sapiens
gcgtgcccgcgctgagggctggcgtcgtggcaagtggcaccgggcctctttgtgcagcgccttgctgacgcccagggttctgatgtagaagcctacaccagggcctgaggttgtgaaactcatggcagtccacgcctgagaagagaaggcctgaaagagaaggaagagcccatgggacttgccacggttttgacttacatctgcaactccaaggctacaggcaggaagtaagaacagtgctcaagtggcagcagatactgactatggcttcatttcacagcttcacacagcagggtagcagaaaacaaagaatgtaagattggacccagttgcagctgttcaccaactctgtgatcttcaaaaagccatatagcttctccagacctgttaatcagggaagaagcagataactgaaggctggctttgagaagtttcgaggtaacataggaacctgctcatgcaggcactctttccatctgacttgggccaaggtgctccgtgattgacaagcagccagcctctgggagagcactctgatcagatcattgatagaacattcactactctacttatcatacccatttacttatctccatcttctgttagactccttaaaaacagcagcccacagcaggtgtggggataaaacagtcctgggcagtgctcattgtactcacactatgccaggcactgtgccaggaacattcaaatttctaagaatctacaaagtagatacctcattatacatcttacagagagcatcattggtgtttccaaggtcacagggctaggcaagggtggaaccctgagtctgcttgtctgtttgccccatgacagcccaggggtggtggcctcaccccacctccaggcacccacaagaatataaaatcttgtacaaggatgtcgatattactattgccattcccaagtgcacctgcacctgtagtatcaggtggtttgcagccttggctgcatagctgcatatgagaatcacctgggaagcttttaaagatcccagtatccccacctcttccccagttacagtggagtcttgcgggtggtgggggacatcattatttttgaagcttccaagtaattctggtgtgcagtggggtgaccagctgtcccagggacctcctttaaaaaataatatcccgggcacatgacaggccaattgccctaatgcaaccaaggttaagaactactggtttaatgggagatattttttctgtgcttgattatactgttttattaaactctgaatccatttctttctgcaaatttttaaggcaaaaaagaaatgtgaaaatatacgtctcatttttagcaccttcagagacccggagtcatttgatgtgcttcatgacataaaattttgtaatatgccgtgtgatactaccttatttttaccatatatgtatttttaatgcttaacaagagcatatttgctctttcacatttttttttcacatacaaagttttagacatcaagcactctaaattcttttttacaaatatttttttcttaaaatgttaagaaaaagcctataatatcacttcctttgtttcctgatgtagactcagttgatgtgcacagcagtgtcaagtcaatctccaaaatactccctgtagacagggtggggagaagaccctcacttcctgccgactaatgaactcatgttgatacagacctttgcctcatcagattcatttgttaagctaaccagtgtctgcttctctggacattactggactcttctacctgtgaagccatcttaaaaaaatatattgactgatttcttaacgaaacatctactctttgccaagcataaagttacctcccacttgcatacacccttttctcatttgtcctcacatcagctgtataaatgagaaatattcacattttataagtgagaacattcaggctcagataggttaacaagtttgaaatcatgtgctagtaaaccaaacacctaggttttgaaccttgttcttcttgtcccaaggtcattattctctactgtgttacactcagctgctttcacctggaaaagcagaggaatcaggctgtctcctgcagctgtcttggtccattctgctgcccaagcagtacacttggtttcagatggaaatctaggatcccaagcatgggtacatttgtcggcagcatttggaagtatttttcgtcatcaggatggcagtcaatttgcaattcagtcatctcagtgcaaggtagtttggcaaaaagattatgacacttaatggatttttttcctcttttaaatctgtttacccagcattttgtagtataatgcaatgtaataacattgcattattttgagcatagtttagaagccaagaagatgctttcaaacagctgacataattcagttatggcccagatgtcctgccttccccatcacacattcatattaatggtcttagaaagctgtttctgaggcaacagtttcttcctcaatatcatcctactggggaaattttggcagttgatgtctaatgttgatttttttttcctgattgattttaattgttcactgggcactttggggtagaattgttttaaaaatttggttactgggaaagctagacaagcctttgctatggtgaaagagacagaaggaatatagatataatttgtaagtggttatgccattgggcttaatgctttgcatacattatctagtttgcatctcctgatcgccctttaagtttgcttacggtaaagcattattccttgcttggcaatgcacagagaaaaattatttgctgaaggaccctgcaaatgagggacaggatcagagttggaactgtaaaccctgccactccatttcatgtgatcttcatgggtacagcagctataccctgccccagcaatgagtatggtagagccacattcaaaggcggactttggggtcagcattcctgaaaagagctgcttaagtttgcttctacatccaaaaacgatgcagtcacagtcaactaacactgagcttgctgggcatctcctgaacagaaatgtatgtggtggtccatgtagcatgtatgcgatataattggccacccacctttccttttcacattaacatttatcacagaaacacattcatttgctacagggatatttcacaatttggctgaactttgagagaagtgggtgaggaaaaggtagtttcgtaactagtttatatataaacctaaattgtagtgagtactcttgtaagtggagcatcttttctatggtaattataaatggctgttagcccctttgcactaaagctaggtgggtggttttgccacagaggtaaattatctttcgggcggtataaccaaacaaataaaatataaagtgagattcagggcatgttctgaatacagcagttaattaggcagctaagaaaactgtattttagcccctctgactatgtgattggtatttttttaaattaaaaaatggaaaataatatttttaacaggttatgatatgtcagtcatttaatcctcacagtaactctgtggggtaggtaggtactgtttctatctcattttacaggtaaggaatcaaaacagtgggtatacccaggttgtatatctagaaagtgatagagctgggattttaaactttataatctgattccagaatctctacctttaaacactatgttaccacttacttctcttcaaattttattgagcattagatgtttccagtatttagaagtcaaatgcttcgtttttaataggaacttacacagtcttttatgtttttttatagccctcaatgtcactgatgtggattctcccaaactcgatactttgtttgtttttatgtccccataataagtctttaagaaaacagggcaagtgagctcaaaatcaaaagaaaacccaccaacagtgaatgcattcagggctatttccaggtctttcttttgaagaaagataagactcagtccagagagcacatctgtgacacaccgtgcctcttgcctttggtgcgtggcagtcatctttggctcatgctgtaccttattctacattagaaaactcactgtatgttgctaaataattttttgaaaacaggcagattaataaatggacatcttatttattgcaccataaaa

SEQ ID NO: 7969 - DNA, 1433 bp, Homo sapiens
acactctaccaccatgaatccactcctgatccttacctttgtggcagctgctcgtgtccctgaattctggctaccacttctgtggtggctccctcatcaacgaacagtgggtggtatcagcaggccactgctacaagtcgtaagtgtggggcccccgactgcaaagctcccggccagtctgcctgggagagcttggcttcagcccagggaactactgaggttgggtaagatggatgggagaggtggtggagaagaaaacttgttggcagctgcggactctccagagcagagagtgaacacaagacaggaacctctcacacccaggcaaatccatgaaacagcaagggttgtggtcataaaagcaggcagggatgatcttggggtggtgagagctagtgagaaaagcaggcaagtatcttttgctggttagctacacattaaagccaactaagaaagactttttaaaaatacagatgcctttgtcctatcccagggcaattaagtcaaaattttcaggaagagggtgtgaatatcagtgagaattttacactctacctctgctaactgtagagtgtatagacagagctgagaactgctgcctacaccaagaactctcaaacctgagtatgcatcagaacgccctgcaggcttgttaaggcacaaatcactgggccccttccccaaggttctgatcagtaggtgggggtaaggaccaagaattcacatttctaacaagttcccaggagatgctaatgctatggctacgcttggattagattacacagaagggtggttctcaccaggccaagaatggagggaggaacaggcactgtgcacagttggcaaaggcctggggtgaagaacgctgggaaaacttcaaggagctccttgtgcccacagtgctagtgactgtggagattgtgggaaagagtctggggaggcaggttgaggagcagcctctggtgggatccctttgactcttccccaccccactaccaccaacctctggagcagataggtcctgggtctcataccttcactgacccacatccctctgctgcccatgcgatatggccacacaccccaccccatgcctccagagctgtccatgagcagagagcttgaggaacctggggaaggtgggataggtgccctggctgtgggagaaggtcttcaccatgcctgccctgcccatcagccgcatccaggtgagactgggagagcacaacatcgaagtcctggaggggaatgagcagttcatcaatgcagccaagatcatccgccacccccaatacgacaggaagactctgaacaatgacatcatgttaatcaagctctcctcacgtgcagtaatcaacgcccgcgtgtccaccatctctctgcccaccgcccctccagccactggcacgaagtgcctcatctctggctggggc

SEQ ID NO: 7970 - DNA, 485 bp, Homo sapiens
ttactgctggtcctgggagccttttccttcggagcagcagccctgtccggcatctgtcttgagctcccagcaaggaaagtccatcagcttgataatggaggagaacaatgactccacggagaacccccaacaaggccaagggcggcagaatgccatcaagtgtgggtggctgaggaagcaaggaggctttgtcaagacttggcatactcgctggtttgtgctcaagggggatcagctctattatttcaaagatgaagatgaaaccaagcccttggtgagtaggagaaaatgtaaagcattaagggcctaagaaagccaagaaatagagggatttgctagaaaccgattgggactgagaccacccaaagctccctggtctccttcagttcattgtcatctttcacccttttacccattgcttgctttgagttggagataataaaatcgctaattgaggccaagaggcaaattatacttgtctaata

SEQ ID NO: 7971 - DNA, 3677 bp, Homo sapiens
attacaggcggatcccatggggccggaggcctgcaccaccgcgagatgtggccattttacaagaaagggctaataagttggtgaaatacctgttggttaaggaccagacaaagatccccatcaaacgctcagacatgctgagggatgtcatccaagaatatgatgaatatttcccagaaatcattgaacgagcaagctacactctggagaagatgtttcgagtcaatctgaaagaaattgataagcaaagtagcttgtatattctcatcagcactcaggaatcctctgcaggcatactgggaacgaccaaggacacacccaagctgggtctcctcatggtgattctgagtgtcatttttatgaatggcaacaaggccagtgaggctgtcatctgggaggtgctgcgcaagttggggctgcgccctgggtatgactgggctctctcagcgcttgctgtccgtgttgtcctttggcaagagaggatggtcctaggattgcatcagtctggtggtctggtggagcgggtggggtgctggactgggtagagggcccagggttctgacctgggtggatgacgggcaaatggtcctgaactctctgctgtctctctccttaatgtcctctgtctgttctaagctgagatgttagatagaccttcagggatccctgacaaagaggcatctggtcttaactgcttgcttctagtggccatgtgctcattactttcttcacttcattgagactgccccatgtgctagagaggtctcttccatgttgggaaatgcctctgccctcatctgggcagttctgatctgtgttcatgggttatttttcccattgtcagggtgaggcattcactctttggggaagtgaggaagctcatcacagacgagtttgtgaagcagaagtacctggagtacaagagggtccctaacagcagaccacctgaatatgagttcttctggggcttgcgctcctaccacgagactagcaagatgaaagtcctcaagtttgcatgcagggtgcagaagaaagaccccaaggactgggctgtgcagtaccgcgaggcagtggagatggaagtccaagctgcagctgtggctgtggctgaggctgaagccagggctgaggcaagagcccaaatggggattggagaggaagctgtggctgggccctggaattgggatgacatggatatcgactgcctaacaagggaagagttaggcgatgatgctcaggcctggagcagattttcatttgaaattgaggccagagcccaagaaaatgcagatgccagcaccaacgtcaacttcagcagaggagctagtaccagggctggcttcagcgatggtgctagtattagcttcaatggtgcacccagctccagtggtggcttcagtggtggacctggcattacctttggtgttgcacccagcaccagtgccagcttcagcaatacagccagcattagctttggtggtacactgagcactagctccagcttcagcagcgcagccagcattagctttggttgtgcacacagcaccagcactagtttcagcagtgaagccagcattagctttggtggcatgccttgtaccagtgccagctttagtggtggagtcagctctagttttagtggcccactcagcaccagtgccactttcagtggtggagccagctctggctttggaggcacactcagcaccacggctggctttagtggtgtactcagcactagcaccagctttggcagtgcacccacaacgagcacagtcttcagtagtgcgcttagcaccagcactggctttggaggcatactcagcaccagtgtctgttttggtggctctcccagctccagtggtagctttggtggtacactcagtaccagtatctgcttcggtggctctccctgcaccagcactggctttggaggcacacttagcaccagtgtctcctttggtggctcttccagcaccagtgccaattttggtggtacactaagtaccagcatctgctttgatggctctcccagcactggtgctggctttggtggtgctctcaacaccagtgccagctttggcagtgtgctcaacaccagtactggttttggtggtgctatgagcaccagtgctgactttggcggtacactaagcaccagtgtctgctttggtggctctcctggcaccagtgtcagctttggcagtgcactcaacaccaatgctggttatggtggtgctgtcagcaccaacactgactttggtggtacactaagcaccagcgtctgttttggtggctctcccagcaccagtgctggctttggtggtgcactcaacaccaatgccagctttggctgtgccgtcagcaccagtgccagcttcagtggtgctgtcagcaccagtgcttgcttcagtggtgcaccaatcaccaaccctggctttggcggtgcatttagcaccagtgctggcttcggtggggcacttagtaccgctgctgacttcggtggtactcccagcaacagcattggctttggtgctgctcccagcaccagtgtcagctttggtggtgctcatggcaccagcctctgttttggtggagctcccagcaccagcctctgctttggcagtgcatctaatactaacctatgctttggtggccctcctagcaccagtgcctgctttagtggtgctaccagccctagtttttgtgatggacccagcaccagtaccggtttcagctttggcaatgggttaagcaccaatgctggatttggtggtggactgaacaccagtgctggctttggtggtggcctaggcaccagtgctggcttcagtggtggcctaagcacaagttctggctttgatggtgggctaggtaccagcgctggcttcggtggaggaccaggcaccagcactggttttggtggtggactgggcaccagtgctggcttcagtggcggactgggcaccagtgctggctttggtggtggactggtcactagtgatggctttggtggtggactgggcaccaatgctagtttcggcagcacacttggcaccagtgctggctttagtggtggcctcagcaccagcgatggctttggcagtaggcctaatgccagcttcgacagaggactgagtaccatcattggctttggcagtggttccaacaccagcactggctttactggcgaacccagcaccagcacgggcttcagtagtggacccagttctattgttggcttcagcggtggaccaagcactggtgttggcttctgcagtggaccaagcaccagtggcttcagcggtggaccgagcacaggagctggcttcggcggtggaccaaacactggtgctggctttggtggtggaccgagcaccagtgctggctttggcagtggagccgccagtcttggtgcctgtggcttctcgtatggctagtgaggtttcagatttattccccatgtttacagataccgctaataaattgcagtagtccttcccatggagccaaagtacatccttggaatctttgtccacacagcagtcaaggcagttatggccaatcagctgagggtgtcatgtgatggaaaaatctgtttgctgttcctgctttattgtttgctttctgtgtgctgtcatattttggtatcagagttacattaaatttgcaaaatg

SEQ ID NO: 7972 - DNA, 570 bp, Homo sapiens
attctgaagacgagagaaagaggagcaggaagaatcttccatgaactctgcaaacctacaaactttccaatgagaagtggtgcacactcccgagatggtgcttgggacaacatggttaaaaggaatcatgtcaaccctgccatggacttcacgcagactccacctgggatgttggctctggacaacatgctgtactttgccaagcaccaccaagatgcctacatccggattgtgcttgagaacagtagtcgagaagacaagcatgaatgtccctttggccgcagtagtatagagctgaccaagatgctatgtgagatcttgaaagtgggcgagttgcctagtgagacctgcaacgacttccacccgatgttcttcacccacgacagatcctttgaggagtttttctgcatctgtatccagctcctgaacaagacatggaaggaaatgagggcaacttctgaagacttcaacaaggtaatgcaggtggtgaaggagcaggttatgagagcacttacaaccaagcctagctccctggaccagttcaagagcaaactgcagaacctgagctac

SEQ ID NO: 7973 - DNA, 787 bp, Homo sapiens
tgtggagctgccagagtaaagcaaagagaaaggaagcaggcccgttggaagtggttgtctacttgcaatatgtgctctgggctggacgcggtggctcacgcttgtaatcccagcactttgggaggccaaggcaggcggatcacgaggacaaccccagcaatgtggagaagcctggggcttgccctggctctctgtctcctcccatcgggaggaacagagagccaggaccaaagctccttatgtaagcaacccccagcctggagcataagagatcaagatccaatgctaaactccaatggttcagtgactgtggttgctcttcttcaagccagctgatacctgtgcatactgcaggcatctaaattagaagacctgcgagtaaaactgaagaaagaaggatattctaatatttcttatattgttgttaatcatcaaggaatctcttctcgattaaaatacacacatcttaagaataaggtttcagagcatattcctgtttatcaacaagaagaaaaccaaacagatgtctggactcttttaaatggaagcaaagatgacttcctcatatatgatagatgtggccgtcttgtatatcatcttggtttgcctttttccttcctaactttcccatatgtagaagaagccattaagattgcttactgtgaaaagaaatgtggaaactgctctctcacgactctcaaagatgaagacttttgtaaacgtgtatctttggctactgtggataaaacagttgaaactccatcgcctcattaccatcatgagcatc

SEQ ID NO: 7974 - DNA, 905 bp, Homo sapiens
cccctggatgaaacactgaagaaagcccttacaggtcaccttgaggaggttgttttagctctgctaaaaactccagcgcaatttgatgctgatgaacttcgtgctgccatgaagggccttggaactgatgaagatactctaattgagattttggcatcaagaactaacaaagaaatcagagacattaacagggtctacagagaggaactgaagagagatctggccaaagacataacctcagacacatctggagattttcggaacgctttgctttctcttgctaagggtgaccgatctgaggactttggtgtgaatgaagacttggctgattcagatgccagggccttgtatgaagcaggagaaaggagaaaggggacagacgtaaacgtgttcaataccatccttaccaccagaagctatccacaacttcgcagagtgtttcagaaatacaccaagtacagtaagcatgacatgaacaaagttctggacctggagttgaaaggtgacattgagaaatgcctcacagctatcgtgaagtgcgccacaagcaaaccagctttctttgcagagaagcttcatcaagccatgaaagtatgtaccattctacttatatgtcctgcttagaggaagaattatttgtagaaagaacagaaaacctcatgttgtttgaaaatctcacatttaatatcttcccattaatgagaatcattgttctatttgatgaaagaggtaatacactaccttctcagaataaacttctgttagattcggtgcttttttttacagatgagattgtaaagtgagcctgtaagtgatttacggctcacttgtgatttgcttaaaacatgtgtcaccacgggaagggtgatgtactttcttttttaacgtgtaattttagtggccta

SEQ ID NO: 7975 - DNA, 1553 bp, Homo sapiens
gcccgccccagcagtggctgcaccatgcacgtgaacggcaaagtggcgctggtgaccggcgcggctcagggcataggcagagcctttgcagaggcgctgctgcttaagggcgccaagacacttttagaaaagttgtagaccactttggaagactggacattttggtcaataatgctggagtgaataatgagaaaaactgggaaaaaactctgcaaattaatttggtttctgttatcagtggaacctatcttggtttggattacatgagtaagcaaaatggaggtgaaggcggcatcattatcaatatgtcatctttagcaggactcatgcccgttgcacagcagccggtttattgtgcttcaaagcatggcatagttggattcacacgctcagcagcgttggctgctaatcttatgaacagtggtgtgagactgaatgccatttgtccaggctttgttaacacagccatccttgaatcaattgaaaaagaagaaaacatgggacaatatatagaatataaggatcatatcaaggatatgattaaatactatggaattttggacccaccattgattgccaatggattgataacactcattgaagatgatgctttaaatggtgctattatgaagatcacaacttctaagggaattcattttcaagactatgatacaactccatttcaagcaaaaacccaatgaacagcttatgtgttagccatagctgaaaataagcacaaatagcttatattcagatcctatcttcatttgaatatagcttttaaatgaaatgttacagtttgaagttttccttcatgcacttggtgataaacgttttctaaatttttagttaagtatatggataaaaagttatgaactattaaaaatgtgatgtggaccaaaggctaggttgtaatcttgatagtctaaaaaatgatcaaaacaaatgattttcaaggaatattcaatattctgcctttcagaaagtgtatttatatctgtgcttcataaatattaatgttcttcagaacatcattttaaaggagatacttgaattgttatttaaatcaaaccagatgtaaaacactcacatacaagttcatactttaaaagaggaaagctacttaacaatgacaaatatttcacaataataatttttacttatataccatctttcaactgaacatttcagttcttccaagagcttcttagagtagtatattttgggggcagtcaaggaataaactacagtgtaaacatatcccagatgaaaactgctgtatggaaaaatgacagaaagtaactgattgacactgttgattcacagttcagcctcctatctgggaaagacatttctttcctctgctcactttaagaacttttaccgactccaaaaatctcaggaattaaacttttaacagttacagcaataaagaatagttagtactccaaaaatattatatttaagatgctcaacaagaaaaaaatgcaaatgtaatatttttttcaaattacttctttattgacttgtccaaatttcaaaagtgcctaccc

SEQ ID NO: 7976 - DNA, 1831 bp, Homo sapiens
aaagaaaaacactctcaatcctgtctacaatgaggccatcatctttgacattcccccggaaaacatggatcaagtcagcctgctcatctcagtcatggactatgatcgagtgggccacaatgagatcataggagtctgtcgtgtggggatcactgctgaaggcctgggcagggaccactggaacgagatgctggcatacccccggaagcccatcgcacactggcactccttggtggaggtaaagaaatccttcaaagagtggcagggccgagctgctagcttcgacagtgagagctcgtgcccatctccgaaaccacctccaacaccatgagatgtgcagccaaataacacaaatgggactcagcaatgttctctttgcacttgttcaaccgtctaaacagtgttgtgcagtcgcagtggcggcagcagcggcagccgtccgtcactccagagtcttacctgctcctgtgtaggtcaaagctgagacacttgtcatgtggtcagatctgtcttagtcttttgtgtctcccaaggtgatgtttttgtggtttttcactttttatgggtctgctggtaagaaaagggaaaaaaaaaaagagtaggaaaagacaaagggtggaaagcccagaagttggttctagaaaatacaaggtacagttttttggaaagaggtggattgagtttctgaaatgctgcgtctccagcaagctccacaaccctggaaaaggaggaggcgtggtgggactgcggctgcattttcagtgccctgcaggaatggggtgaatccatggaagagcctttgtgaggtgaattactagtctttgaagctcttcgctggcaggacataaaccacgctgggaccctcagtcccgtgttgaaatcacaagacctctgaggcgcttgtgagccttcagctgatgtgcagggttcctcgctccccttcctcgctggctttccccatgaattgaaaacgtcttgattcctcatgggaacttagtcactttctttaggaatgattcagttcagccgaaactaaacacgccatatgttttctgatgcgccacagttaatgatcacatttgtttgaaaacaggatctttgtcctcagaaataatcttgattgtaaagtaagagagaaacatatgttctggaatgatttctgcattatacatagctttataattccatgaagtatcaagctgctgtttaaaatgcctaaacagattaaagaaaaacctagattaaatgttcttttccaaatggggagttttgaaatccaaatagcagtttgagtccatctttctatgaagagtatgtttttgattgaaaccgagtcagcgtaagcctatttcagcccctttggctctttgacaatattcatcttaaactttagttctataaattactaagtacttcagtgttgtttgtttcagtggttgtgagggtttcttgtttcctttagatctttaccttaggccaaactcagtttaggaaaaaaaaaattgtttgaactattctgtgttgtaatagcacatttctgttgagttaatagtggtcttcccaccaacccctaaaaccaggttgatttgctcaatctcagtttgtataaccccagtaagcgcatggaggtgagtttctacttcgacttgtggcgacacagtgccagtttcctgagctgtgtgtactacttgcaagaggcaagtctgctgaagaaccccttcttttaacagtggaaaatcaagaacagaaaatctgttcacacacctgtgtcttattctttatatatgctacatggtagaggagcagcgaccaataaagtatccctcatttt

SEQ ID NO: 7977 - DNA, 576 bp, Homo sapiens
acgtagagggaatgagtcaggctccggctccacactggcacgtagtgggcggatcgcgccggcgctgagtaggaaggagcttcagccgccagcccggaacgcaaagctcctgaaaagtacatcaagtctaaagtgaaccagctaactcattaagactggaatcatgagcaacaatggagcagacctaacctttggttacatctcctgttttgtagctatccttttgtttggctcaaattttgtgccacttaaaaaatttgatactggtgatggaatgtttctccagtgggttctttgtgctgccatatggttggttgccttggttgtcaatctgatattacattgtccaaagttttggccttttgcaatgcttgggggctgcatttgggcaacagggaacattgctgttgtcccaattatcaaaaccattggtttaggccttggaatcttaatctggggatcatttaatgccttaactggctgggcaagctcaaggtttggctggtttggattggatgcagaagaagtatcaaatccgctgctaaattacattggagctgggctatcagtagtaag

SEQ ID NO: 7978 - DNA, 727 bp, Homo sapiens
tgaagaggaaaagtgggttgaagttgcctcaatgaaagtgcctagagcaggcatgtgtgttgtggcagtcaatggtcttctgtatgtttctggaggtcgatcttccagccatgattttttggctccaggtaccttggactcagttgaagtttataaccctcattcagatacatggacagaaattggtaacatgatcaccagtcgttgtgaagggggcgttgctgtgctatgaaatataaagcataacagagcacaaggaacattttgaaaatgcaggacctgaccttttgcaaagcaaacatagatttggtgataagaccctctgattctgtgagttttccatgtatttggtagataaatgactaacgaggctgggcgcagtggcctcatgcctataatcccagcactttggaaggctgaggcagaaggatcacttgagcccaggaatttgaggttgtagtgagctgagatcataccactgtgttctagcctgggccatagagcaagactttgtctcaaaaaaaaataaaacaaaaaatatttggtttagtctacaactataccttccttataacttaaccatatgcatttattaggaaaagtttatgtaatgcagacaggaagctctatgttcccttctctggggcatcctgaacgtctgaagggtcacagatgtctgtgtagagatctgtaagatgtcaaagaataaagataatttatagactaa

SEQ ID NO: 7979 - DNA, 632 bp, Homo sapiens
tgtctgttctaagctgagatgttagatagaccttcagggatccctgacaaagaggcatctggtcttaactgcttgcttctagtggccatgtgctcattactttcttcacttcattgagactgccccatgtgctagagaggtctcttccatgttgggaaatgcctctgccctcatctgggcagttctgatctgtgttcatgggttatttttcccattgtcagggtgaggcattcactctttggggaagtgaggaagctcatcacagacgagtttgtgaagcagaagtacctggagtacaagagggtccctaacagcagaccacctgaatatgagttcttctggggcttgcgctcctaccacgagactagcaagatgaaagtcctcaagtttgcatgcagggtgcagaagaaagaccccaaggactgggctgtgcagtaccgcgaggcagtggagatggaagtccaagctgcagctgtggctgtggctgaggctgaagccagggctgagtggttccaacaccagcactggctttactggcgaacccagcaccagcacgggcttcagtagtggacccagttctattgttggcttcagcggtggaccaagcactggtgttggcttctgcagtggac

SEQ ID NO: 7980 - DNA, 4577 bp, Homo sapiens
gatctttttttttttttttgtagttgagctgaaattcatataacctaaaatcgaccatttcatagtgaacaattcagcagcgtttagtgcattcacaatgttacgaggccacctttcctatctagttgcaaacattttcatcactcaaaagcctatgccattaattagtcactccccattctcctctctccccactcctggcaaccaccaatttgctttccggctgtatagatggatttactattctggatattttgtacaaatggaatcatatgatgatgtcttgcatctttcacttagcatgtctttgaagttcatccccattggagcatggatcagtacttcattcctttttatggctgagtaatattccactgtatatacataccacagtgtgttcatcagttacttcatggatgaactttggggcatttctgccttttagctattatgaataaatgctgctatgaacatatgtggataagtatttgtttgagtccctgtcttcagttcttctgggtgtatacttaggagtggaatcactggttatatgataattctatgtttaactttttgaggaactgccaaacttcttctccattagtcttagtaaggttaccttcaaatcaaagtgtgcttactaagtcagcaaaaaggaatgatattagccattgctagcaagggtattgtgagatactcacgttccaattcttctagtgtataaactacctcttttcaatgtgtcgaaaaaaaattaaaagctttaaacattttcacatccttcaaatgtttaattctacttttcataatgttggaaacaacatcacaggcaaaacaattaaacattcacatgtatggtaataaaaagttggaaaatactttaaatttcattgataaaaagacaaattacaatatatctacttattggtatctaatgtagcaataaaccataaatatgaggcaatgcagaatggaaatgtttgaaatcttcagcaataatagcataatgcagaatataaattatatgaacagagattagaaagtaacatacaaaatgtaacattgtgacagctgaagagattcttaaggaattgctctactcacttgatgttaatcttctcacgttatcttcataagatgaaagttttctaaatcatatagtaatgtgttttgtctgggaaattctctatgcaacctccccagcccttcttttccgtcatgctgatcggaggcaacattgaggtacatgtcaatcctggggatgggacaggcctgagaaaagctctcctgcacgctcccacgggtacctgcagtgatggacaagcgcattccatctccttggtcaggaatcggagaattatcactgtccaattggatgagaacaatcctgtggaaatgaagttgggcacattagtagaaagcaggacgataaatgtgtccaatctgtacgtcgggggaattccagagggagaggggacgtcactgctcacaatgagaagatcgttccatggctgtatcaaaaacctgatcttcaatttggaacttttggatttcaacagtgcagttggccatgagcaagtcgacctggacacctgctggctgtcagaaaggcctaagctggctcccgatgcagaggacagcaagctcttgccagagccccgggcttttccagtaggagcggcttcctttactatcagtcaggtccagtcagcaaaggagggcctaggacagagggagttaaaatggggccttgctgtaaaggtgcctgcgaaagctggagctggagctggagctggagctgtgctaaaaatcagagcggggacagggagggaaagggtgcctcaagcaactcagatgacacggcccaatccatagattgtaggccccaacacccaggccgcgcattgggctgatgtataatatgcttttggcagagcttctataaggactcattatcaatttacatttagccaggaaagcatgaaaataagtacttcatgtaaagccattgtgcacatatttgttgctttaaaaaaaaaaaaagattcaattcattaggaaaagccagttctggccaaatattttgaatggcagccattgctatttttcatgttctccccttttgctttctctgtttccctggtttaaagtgtgcactctaataatttagaagatggcagaagcattcaagagcaggaccttctgagcagggcgaggctttgagttcggggcagttttcatggtagcatctgcctgtgctgaagcagaaaacagcatctgggacccccatgacttgggcactcttaggacagcccgcagatggttgcgtggggttcaggggcccttcccgcctggctcctcttgtctgcatcctgccctgtcagtgtggacctaggttcacactctgaggccctgcaaaacatgtcacctgtgggcacctccagttttccagtgcctggtccgcagctcgtctcggcagctgcatccttagggccattcccaaaacctcgggtcacggcgggggcctagggggacagcaaggcctttgccccttaagcctgatgaaaatttgtaggagagacttcagtgtccttatgaatttcagtgaagccgagtgggattaaggtgacagacagaagctctaagtgctttcttcagggagataaagcgctggcgagtgcatcatttaaaccgaagatggagtgagcgccaacaggcactggtggttgttgctgttctaatgggattgcttcgtagatggcccttcatggcggaacacgcgtgtgtcagtggggttcgggctgcgggtggcggctgagtgtccctgtgtgtctcttacaggaacagtgtgtggtggatgcagctctggagtacgttcccggcgctcaccagtttggtctcacacaaaacagccatttcatcttgccttttaatcagtcggctgtcagaaagaagtaggtatcattctaacatccttatgcggcgtctcattgctagatgtatgggggtgttctgcagccacagagtcttttccaaaagaacctgcttttattttatgatgaagtgcttgatttgcaaccaaatggcaaagagaaggaattcagtgttggtgcaaatcacaacgctttcatggtggttcactggggagtctgtggtttctgccttttcccttctggagagtggctggcttcccctttctgtgtgcatgtaaggaagcgtgtgggcatctaaattaagtctcctggatctattattgtctggactttcaaccccattccactttaagcattccctagtctgatgtctttgtctacccaaactcttacactgtggtggccaaaatcccgagtgccacacccacccctctctgcaccttctggccctcatacctgcctgtccctgggacccttctgccaagggaagatctcaaggcctggagcttggggctcccggactccatgttgctcctctctcctcctgaggtcctccagctcacctgccaggcttgcctgcagtctctgccatgccctgcccgtcttgttgtcattggctgtgccaccctgtcatacccccttagacctgggctcctgtctgtcttctgcagctcctgccatcactctctgtgaattcaacagctgcctaacacctgacctttctgtgctcaaactgtgatctgtggaaggtctttccctgctccctcctcagccagcctcttccgtggccatacccttgacttcttcacaggtatccatccctctcacagtctcgactttaaaagcctcctattagcacacccctttcttcttgtctccactctgtgcctccccactcctgcagtttctcagctgcatggagacctctaagccgctagccctaatgccctcccaccactatctcccctcttctctagccccaaatcacaattcatcccccagataggttccaggccagtgttacaggtgtcctctgcaaaatcccctaaccctttctctctcccactcctgcgagcccaggtaaaagccaacattccgccttctctgtgccagaacccacacgggagaccaaggccaaggagatggatgtctccttcctagctggtttgagctggatatcatagccgtcaatctcagatggagcctccaaacgacatggggagccagtgcattgctctaatatgttcatggtttttattctccatgactacttcctcatagctgctcttagctcagagccctgtgcaccgcagtccctcttcccaccccagctgatgacttgcctcgttgagaagaaagagctccttcatccgtccaccaccaaaaagaccagcccctgcttttgttcctgaccctctatctcttctgctaccacagatgaagggtacttgttcctagcaaagcccacccagccagccccagcttgtcctctggatcccatccgccctctcctcctaggacatgcacagcagccactcctcacagaccagcacacagatgccgctgtcaccccatcgtcagcagtgacagcaagagcagcaaactattgtgctggaggttgacacaaagatttttacacagatg

SEQ ID NO: 7981 - DNA, 874 bp, Homo sapiens
cttgtgccaccagaagagctcctctctgccgggcaccgcctgcctggagcagctgctggagccgccgcctcctcccgcagagccggcgcggagtcccgcggagtctcgggccccggagacgggcgaggagcacggcagcagccagaaaataataaacactgctggaaccagtaatgcagaagtccccttggctgatcccggaatgtaccagctggacattacattaagaaggggtcaaagtttagctgctcgagatcgaggagggacgagtgatccatatgtgaagtttaaaatcggaggaaaagaagtttttagaagtaagataatacacaagaacctcaaccctgtgtgggaagaaaaagcttgtattctggttgatcatcttagggagccattgtatataaaggtatttgactatgattttggactacaggatgactttatgggctcagcctttctggatctgacacaattggagttaaacaggcccacagatgtgacccttactctgaaagatcctcattatcctgaccatgatcttggaatcattttgctctcagtcatccttacccctaaagaaggagagtccagggatgtgacaatgctaatgaggaagagttggaaaagatcaagtaagtttcagacccaaagtttacgcctatcagacctacacagaaaatcgcatctttggagaggaatagtcagcatcaccttgattgaagggagagacctcaaggccatggattccaacgggttgagcgatccctacgtgaagttccggcttgggcatcagaagtacaagagcaagattatgccaaaaacgttgaatcctcagtggagggaacaatttgattttcacctttatgaagaaaga

SEQ ID NO: 7982 - DNA, 1401 bp, Homo sapiens
agactgtgaattttctttctttgatcctaatgatgcatcatgccaggaaattctttttgatcccaaaacttcagtttcagaattatttgccattttgagacagtgggttcctcaggtccaacaaaacattgacattattggaaatgaggtaaggaattcttacattttaagttttgcattgttaggattgttaatggtatagatttttttccccatctgaaaggaagatggtaataaaggagaaaccctttaaaagttctgatatttatttgtatttccaggattttcatggggcagtgagttaatactatatattcttctgattatttcttcatgctctgtacttctgacatttgtagactcctggcgggtgcagggaggggcatttttcatatttccttctttgtaaaattaattttgtaaacttttatgcatttcataaagggatttgattaccatcatgttctatttacacttttggttggtttggtaaatatataggcttgaatgtagtctttaagaatattagattttttgagggagggttccttgaccagtatgttgctgtgttgtaggaagagagtgcttatacttttttcaaatatcattacacgcatagaaataaaattttgctcatttttgagaggaacatatttggagtgccagattacctttggaataatctttaagaatttccttcagcctgctgacaagttcagttttcattattgttgttgagtacagatttaaaaatttacccttaagatatgctcatactgtctatacattttactgagaagtaattcagatacgatagactaacttggttcctcagcattggtttgaaagcaataggtacctcagtagttaggttgtaaccatattttccttgactgcttcagattcttaagagaggttgcaatgtgaatgatagagatggattgacagatatgactcttttacattatacctgcaaatctggagctcatggtattggtaagtgtgtggtaaatctatcagttgcttatgtcatctgcacttgtgcttagataatctatatttatgcccatatattgtctgggggaaggcacccagctgatgatgataatattgcctgaagagctgaggattcagttaggtccttccaaaaaccatattccctttaatcaaggaggtctttataccctcctgatacctcttaacttttctggatcaggcctcatgcctgattgcataatagatgagagtaactagtaacaccctaaaatctttctgagggtttataacaaggtttgacagtccaaggtcagtctttgcatactgatccctaatcttaagaccccagtcttgagacctaaggtctgttcctacatatgtaacatatgtgcatattttccaaaa

SEQ ID NO: 7983 - DNA, 601 bp, Homo sapiens
atttcttccactaaagcgtttgcggagacttcaagatcgagcctgcgtgctgccgaagcagggcgccgagtccatgcgaactgccatctgatccgctcttatcaatgaagcagccgatcatggcggatggcccccggtgcaagaggcgcaaacaagccaatcccaggaggaaaaacgtggtgaactatgacaatgtagtggacacaggttctgaaacagatgaggaagacaagcttcatattgctgaggatgacggtattgccaaccctctggaccaggagacgagtccagctagtgtgcccaaccatgagtcctccccacacgtgagccaagctctgttgccaagagaggaagaggaagatgaaataagggagggtggagtggaacacccctggcacaacaacgagattctacaagcctctgtagatggtccaggtaagtgtctaaaatcacttggcctcttcctgtaccatcttcacatcttcaactaatctgttccacctagcagatcgcccacaaccaaataattaaaatatttctttccattgagcccttgcagaatagagataccaaagctggtgacagattatgaagtgatagt

SEQ ID NO: 7984 - DNA, 4138 bp, Homo sapiens
ggcaatagcagaataggagcaagccagcactagtcagctaactaagtgactcaaccaaggccttttttccttgttatctttgcagatacttcattttcttagcgtttctggagattacaacatcctgcggttccgtttctgggaactttactgatttatctcccccctcacacaaataagcattgattcctgcatttctgaagatctcaagatctggactactgttgaaaaaatttccagtgaggctcacttatgtctgtaaagatgggaaaaaaatacaagaacattgttctactaaaaggattagaggtcatcaatgattatcattttagaatggttaagtccttactgagcaacgatttaaaacttaatttaaaaatgagagaagagtatgacaaaattcagattgctgacttgatggaagaaaagttccgaggtgatgctggtttgggcaaactaataaaaattttcgaagatataccaacgcttgaagacctggctgaaactcttaaaaaagaaaagttaaaagtaaaaggaccagccctatcaagaaagaggaagaaggaagtggatgctacttcacctgcaccctccacaagcagcactgtcaaaactgaaggagcagaggcaactcctggagctcagaaaagaaaaaaatcaaccaaagaaaaggctggacccaaagggagtaaggtgtccgaggaacagactcagcctccctctcctgcaggagccggcatgtccacagccatgggccgttccccatctcccaagacctcattgtcagctccacccaacagttcttcaactgagaacccgaaaacagtggccaaatgtcaggtaactcccagaagaaatgttctccaaaaacgcccagtgatagtgaaggtactgagtacaacaaagccatttgaatatgagaccccagaaatggagaaaaaaataatgtttcatgctacagtggctacacagacacagttcttccatgtgaaggttttaaacaccagcttgaaggagaaattcaatggaaagaaaatcatcatcatatcagattatttggaatatgatagtctcctagaggtcaatgaagaatctactgtatctgaagctggtcctaaccaaacgtttgaggttccaaataaaatcatcaacagagcaaaggaaactctgaagattgatattcttcacaaacaagcttcaggaaatattgtatatggggtatttatgctacataagaaaacagtaaatcagaagaccacaatctacgaaattcaggatgatagaggaaaaatggatgtagtggggacaggacaatgtcacaatatcccctgtgaagaaggagataagctccaacttttctgctttcgacttagaaaaaagaaccagatgtcaaaactgatttcagaaatgcatagttttatccagataaagaaaaaaacaaacccgagaaacaatgaccccaagagcatgaagctaccccaggaacagcgtcagcttccatatccttcagaggccagcacaaccttccctgagagccatcttcggactcctcagatgccaccaacaactccatccagcagtttcttcaccaagaaaagtgaagacacaatctccaaaatgaatgacttcatgaggatgcagatactgaaggaagggagtcattttccaggaccgttcatgaccagcataggcccagctgagagccatccccacactcctcagatgcctccatcaacaccaagcagcagtttcttaaccacgttgaaaccaagactgaagactgaacctgaagaagtttccatagaagacagtgcccagagtgacctcaaagaagtgatggtgctgaacgcaacagaatcatttgtatatgagcccaaagagcagaagaaaatgtttcatgccacagtggcaactgagaatgaagtcttccgagtgaaggtttttaatattgacctaaaggagaagttcaccccaaagaagatcattgccatagcaaattatgtttgccgcaatgggttcctggaggtatatcctttcacacttgtggctgatgtgaatgctgaccgaaacatggagatcccaaaaggattgattagaagtgccagcgtaactcctaaaatcaatcagctttgctcacaaactaaaggaagttttgtgaatggggtgtttgaggtacataaggtaagcccacaccattgttttataaaatttctcctgcaacctccaatttttaaagtcttaacttgtcaactggagtttggtcaacttactcaacacagaaaatcaaccccttcacccttcccccagcactagagataattgaatagagttcatttcaggatatggggtacgttatattgtaacattcctcttcttaaggtatcatcatgcaagttatttagacagtcactaggaaacttggcattttattagttttgatgatctattcagagccacccttgtccaggacagtgcagagtttatatcaacacacatatccttaggattttgtttctttgagttcttctccatctgtatcaatgacaacttaatttaattgtgaataaaagagttgctctcccaagcctgaatcctgattgtgacaaccagagtaagaaataaaatagactactctgctttagaatgcagctatgtctaacagttagctagaattctgatcatttggactccaaagtttcttgcctcttctcattcattaattcatcaggagactgtagagcaactaacttctgcattaaataataagagaaatacgaagcaaaaagactaaaaaagtcacgtagcttaactgctcaatttataaatggggcaataaaatgcaaaaaaaagaaaaaaagcttggtgaattcttaggcttacagtgtgcctttcagtctctacacatcatgtaaatattatgcttagctgatttaacttcttgtttgaagtactgtttcatactccattatacatgtcttctagggtggcttacttttaattgtgctgttttctctacactcagtttaaatgactgtacatatatatgtggttgtagagttaatgaataatgagctacaaaccagaacaatgtgactagatagataggatgatctagatttgagatctgggcagattgggaaagagtgactatatggagaagaaagaagtagttacatattgaaataacagtctacttaatgaggacgtgcaacattctttctcaaacttacaaagtgccataaaaagcctctattctctgctcttgggcaggtgtgaaagaaacctaccaaattaatcagatttttctgtatccaggctccttaaaaaatcccagctgtgctgatgtggaaacaggaagaattaggaaagtaatcaattttttttcctagaaaaaatccagcagacaaagaacttcaacaaaagaggctcaagggaggagttgaaaggcaggattcaaagaccaagtatcttaagctatttggtacctgttattcaggacctacagctctgtttactctatcaaagacaaaagtttccagaaacaccctgtatttctcatagatttgaaaattattgatccagtttcagaagataagtgttaattttcttttgcagaaaaatgtaaggggtgaattcacttattatgaaatacaagataatacagggaagatggaagtggtggtgcatggacgactgaccacaatcaactgtgaggaaggagataaactgaaactcacctgctttgaattggcaccgaaaagtgggaataccggggagttgagatctgtaattcatagtcacatcaaggtcatcaagaccaggaaaaacaagaaagacatactcaatcctgattcaagtatggaaacttcaccagactttttcttctaaaatctggatgtcattgacgataatgtttatggagataaggtctaagtgcctaaaaaaatgtacatatacctggttgaaatacaacactatacatacacaccaccatatatactagctgttaatcctatggaatggggtattgggagtgcttttttaatttttcatagtttttttttaataaaatggcatattttgcatctacaacttctataatttgaaaaaataaataaacattatcttttttgtgaaa

SEQ ID NO: 7985 - DNA, 3453 bp, Homo sapiens
atggcggtgccggctcggacctgcggcgcctctcggcccggcccagcgcggactgcgcgcccctggcccggctgcggcccccaccctggccccggcacccggcgcccgacgtccgggcccccgcgcccgctgtggctgctgctgccgcttctaccgctgctcgccgcccccggcgcctctgcctacagcttcccccagcagcacacgatgcagcactgggcccggcgtctggagcaggaggtcgacggcgtgatgcggatttttggaggcgtccagcagctccgtgagatttacaaggacaaccggaacctgttcgaggtacaggagaatgagcctcagaagttggtggagaaggtggcaggggacattgagagccttctggacaggaaggtgcaggccctgaagagactggctgatgctgcagagaacttccagaaagcacaccgctggcaggacaacatcaaggaggaagacatcgtgtactatgacgccaaggctgacgctgagctggacgaccctgagagtgaggatgtggaaagggggtctaaggccagcaccctaaggctggacttcatcgaggacccaaacttcaagaacaaggtcaactattcatacgcggctgtacagatccctacggacatctacaaaggctccactgtcatcctcaatgagctcaactggacagaggccctggagaatgtgttcatggaaaaccgcagacaagaccccacactgctgtggcaggtcttcggcagcgccacaggagtcactcgctactacccggccaccccgtggcgagcccccaagaagatcgacctgtacgatgtccgaaggagaccctggtatatccagggggcctcgtcacccaaagacatggtcatcatcgtggatgtgagtggcagtgtgagcggcctgaccctgaagctgatgaagacatctgtctgcgagatgctggacacgctgtctgatgatgactatgtgaatgtggcctcgttcaacgagaaggcacagcctgtgtcatgcttcacacacctggtgcaggccaatgtgcgcaacaagaaggtgttcaaggaagctgtgcagggcatggtggccaagggcaccacaggctacaaggccggctttgagtatgcctttgaccagctgcagaactccaacatcactcgggccaactgcaacaagatgatcatgatgttcacggatggtggtgaggaccgcgtgcaggacgtctttgagaagtacaattggccaaaccggacggtgcgcgtgtttactttctccgtggggcagcataactatgacgtcacaccgctgcagtggatggcctgtgccaacaaaggctactattttgagatcccttccatcggagccatccgcatcaacacacaggaatatctagatgtgttgggcaggcccatggtgctggcaggcaaggaggccaagcaggtgcagtggaccaacgtgtatgaggatgcactgggactggggttggtggtaacagggaccctccctgttttcaacctgacacaggatggccctggggaaaagaagaaccagctgatcctgggcgtgatgggcattgacgtggctctgaatgacatcaagaggctgacccccaactacacgcttggagccaacggctatgtgtttgccattgacctgaacggctacgtgttgctgcaccccaatctcaagccccagaccaccaacttccgggagcctgtgactctggacttcctggatgcggagctagaggatgagaacaaggaagagatccgtcggagcatgattgatggcaacaagggccacaagcagatcagaacgttggtcaagtccctggatgagaggtacatagatgaggtgacacggaactacacctgggtgcctataaggagcactaactacagcctggggctggtgctcccaccctacagcaccttctacctccaagccaatctcagtgaccagatcctgcaggtcaagttgccaatcagcaaactgaaggattttgagttcctgctccccagcagctttgagtctgaaggacacgttttcattgctcccagagagtactgcaaggacctgaatgcctcagacaacaacaccgagttcctgaaaaactttattgagctcatggagaaagtgactccagactccaagcagtgcaacaacttccttctgcacaacctgatcttggacacgggcatcacgcagcagctggtagagcgtgtgtggagggaccaggatctcaacacgtacagcctactggccgtgttcgctgccacagacggtggcatcacccgagtcttccccaacaaggcagctgaggactggacagagaaccctgagcccttcaatgccagcttctaccgccgcagcctggataaccacggttatgtcttcaagcccccacaccaggatgccctgttaaggccgctggagctggagaatgacactgtgggcatcctcgtcagcacagctgtggagctcagcctaggcaggcgcacactgaggccagcagtggtgggcgtcaagctggacctagaggcttgggctgagaagttcaaggtgctagccagcaaccgtacccaccaagaccagcctcagaagtgcggccccaacagccactgtgagatggactgcgaggttaacaatgaggacttactctgtgtcctcattgatgatggaggattcctggtgctgtcaaaccagaaccatcagtgggaccaggtgggcaggttcttcagtgaggtggatgccaacctgatgctggcactctacaataactccttctacacccgcaaggagtcctatgactatcaggcagcctgtgcccctcagccccctggcaacctgggtgctgcaccccggggtgtctttgtgcccaccgttgcagatttccttaacctggcctggtggacctctgctgccgcctggtccctgttccagcagcttctctacggcctcatctaccacagctggttccaagcagaccccgcggaggccgaggggagccccgagacgcgcgagagcagctgcgtcatgaaacagacccagtactacttcggctcggtaaacgcctcctacaacgccatcatcgactgcggaaactgctccaggctgttccacgcgcagagactgaccaacaccaatcttctctttgtggtggccgagaagccgctgtgcagccagtgcgaggctggccggctgctgcagaaggagacgcactcggacggcccggagcagtgtgagctagtgcagagaccgcgataccggagaggcccgcacatctgcttcgactacaacgcgacagaagatacctcagactgtggccgcggggcctccttcccgccgtcgctgggcgtcctggtctccctgcaactgctgctcctcctgggcctgccgccccggccgcagcctcaagtcctcgtccacgcctctcgccgcctctga

SEQ ID NO: 7986 - DNA, 799 bp, Homo sapiens; identical to SEQ ID NO: 7760

SEQ ID NO: 7987 - DNA, 573 bp, Homo sapiens
gcagagctcggatcagaccccagtggtctggctgtagagcccgcgctctaatcattttgttacactgcctctcagatgcttccactctgctttcttccatgtgcaaactattgtgtgcaatcctgtatatgatgatgatagtattttatttttttctgtctgagaagactgttatttttcataaaagagagttttcttatgtgatatgaattaaggttcataaggttagttttcgaagttgcattctttgtatcaagaatttatttttccattgtttaaattattggatagatgttgctatcggagctccacaagaagatgacttgcaaggtgctatttatatttacaatggccgtgcagatgggatctcgtcaaccttctcacagagaattgaaggacttcagatcagcaaatcgttaagtatgtttggacagtctatatcaggacaaattgatgcagataataatggctatgtagatgtagcagttggtgcttttcggtctgattctgctgtcttgctaaggacaagacctgtagtaattgttgacgcttctttaagccaccctgagtcag

SEQ ID NO: 7988 - DNA, 865 bp, Homo sapiens
cagccatcgatcctcgggtggcctcgaggtggtggcagggccgccccctgcagtccggagacgaacgcacggaccgggcctccggaggcaggttcggctggaaggaaccgctctcgcttcgtcctacacttgcgcaaatgtctccgccttcaggaggagaactccgttacacgtcacgaagtcaaatgccaggggaaaccattagctggaatccacaggaaaagaatgcaacacggagcacgaagcccaagcacagaagatcaaagacgccaggagaggacccctcgcaccttttccaaaccaaaaatgtgaagcagcagaacttccaaaacctccggcctcgtcttgtgattccaccaatgcagccatcgccaagcaagccttgaaatagcccatcaagggcaaacaggcccccgaaaaaaagctcaaggaaaagtcgcaaactcacggatttctaccctgtcccaaggagctccaggaagggcaaagcggagctgcaatttgaagaaagggaaagaatagatgaattggttgaaagcggaaaggaaagaaggagtgaagactgacctcatcaatgacaaaggccgggtgtgaacaccagagggagctctcccggggcgcctttgtggtagaaaagcaccggagcctcacggagatcaccgacgccacgggacccctccatggtggatctccgtggatctccacagtaagccgagatcgcgccaccgcactccatcctgggaggcagagggagactccagctcaaaataagtagatgactgaatgaatgaatgaacgaatgaatgaatgaatggatgttacaggtttccaaggtggacttaaacagatggctttatattaccaa

SEQ ID NO: 7989 - DNA, 811 bp, Homo sapiens
atttgaacagggcctgttgtaagtagttaatgtgtttgacaaccctgtaatatttgatatacctttggaaatgcatgagttactaatttttttgaaatctagttgtttgtaatgattgtcacttatgtctaatatcacaaaatattcaagaaattggagctgtgcaatgaacaataggacttctctttaaaaattgcacatcatgcttgtgcagcggcagatgtctgtgatagaagaggacctggaagaattccagctcgctctgaaacactacgtggagagtgcttcctcccaaagtggatgcttgcgtatttctatacagaagctttcaaatgaatctcgctacatgatctatgagttctgggagaatagtagtgtatggaatagccaccttcagacaaattatagcaagacattccaaagaagtaatgtggatttcttggaaactccagaactcacatctacaatgctagttcctgcttcgtggtggatcctgaacaactagatgttcctagacattttctttatggttccaagtgcaaaacaggtgttcttatctaaaacgtcaattagaaaattatctgcggttgttaatctactgtatatttttgtttggtatatttactaagtgcactctttcaaaacttattctataactttatcaattcatgtgaattttagctcaattttcaaagttcactaatattctcaatatttaatgctaaatgctttgctacattgtaactcacctaaaaccttttagtgacaaaatcctaatatgtggaaaaaagcatatgcataaaggaataat

SEQ ID NO: 7990 - DNA, 1033 bp, Homo sapiens
agactgcacgtttttgcggattgggaggagggccgacgccgtggccggatagtctctggagctgccttttgggggtgtttgcctgttggcattttcagtactccacgcgtcaagagtccttccatagtgacgccccccaaggacatctggaatgtcactggtgcccaggtgtacttgagctgtgaggtcatcggaatcccgacacctgtcctcatctggaacaaggtaaaaaggggtcactatggagttcaaaggacagaactcctgcctggtgaccgggacaacctggccattcagacccggggtggcccagaaaagcatgaagtaactggctgggtgctggtatctcctctaagtaaggaagatgctggagaatatgagtgccatgcatccaattcccaaggacaggcttcagcatcagcaaaaattacagtggttgatgccttacatgaaataccagtgaaaaaaggtgaaggtgccgagctataaacctccagaatattattagtctgcatggttaaaagtagtcatggataactacattacctgttcttgcctaataagtttcttttaatccaatccactaacactttagttatattcactggttttacacagagaaatacaaaataaagatcacacatcaagactatctacaaaaatttattatatatttacagaagaaaagcatgcatatcattaaacaaataaaatactttttatcacaacacagtacatatttgtcatttttaaaaagccacacaatagaaacaagacaccaagatatttaattatcttgttgactcctgtaaaatagctaaacactcatcattcgcggtgcaatactcatagacataagttcctgaaacaatagtttgcatgcgtaaggcattcgcaccaaagaaatctgaaaagaaaaaacaaatggtaattagcagaattgtattgaagtgaccccacttctctaccccagaaaaagacaaagatctggtactgtagataatgaataaatgagtggagctgagaacacaca

SEQ ID NO: 7991 - DNA, 632 bp, Homo sapiens
aggaccaggagtccatccagcccctgcttcggcactacagggccttcggtgtcagcgccatcctggactatggagtggaggaggacctgagccccgaggaggcagagcacaaggagatggagtcctgcacctcagctgcggagagggatggcagtggcacgaataagcgggacaagcaataccaggcccactgggccttcggggaccgcaggaatggtgtcatcagtgcccgcacctacttctacgccaatgaggccaagtgcgacagccacatggagacattcttgcgctgcatcgaagcctcaggtggggccccctctttgctggctatacccctgccatgtcccagcctgagcggacccctgggctcatggaggtgccggtgggtgaacactaagctggggcaggagccagagggctgggttctgaccacacttgggtccctcactgttcagccccttcctgaggggccccactgcctcccagaaggcatctcctctcctgccccagctccctgttccctgatcccgcctcatgccccccacccttctccctggctcagggccaggatcgggagctgcaggaagttggtccatgtcagctgccgagccacacttagcccagggtggagg

SEQ ID NO: 7992 - DNA, 252 bp, Homo sapiens
aggaaaactcactaccatgagaattgcagtgatttgcttttgcctcctaggcatcacctgtgccataccagttaaacaggctgattctggaagttctgaggaaaagcagctttacaacaaatacccagatgctgtggccacatggctaaaccctgacccatctcagaagcagaatctcctagccccacaggtatttttaaacttctcataattaaactacagtgatgaaagatagccacactcaggccattt

SEQ ID NO: 7993 - DNA, 929 bp, Homo sapiens
cccctcttctggctctgcgtgtccctctgcgtgccccagtctgtgttccggaactttgacgtcgatggggatggccacatctcacaggaagaattccagatcatccgtgggaacttcccttacctcagcgcctttggggacctcgaccagaaccaggatggctgcatcagcagggaggagatggtttcctatttcctgcgctccagctctgtgttgggggggcgcatgggcttcgtacacaacttccaggagagcaactccttgcgccccgtcgcctgccgccactgcaaagccctgatcctgggcatctacaagcagggcctcaaatgccgagcctgtggagtgaactgccacaagcagtgcaaggatcgcctgtcagttgagtgtcggcgcagggcccagagtgtgagcctggaggggtctgcaccctcaccctcacccatgcacagccaccatcaccgcgccttcagcttctctctgccccgccctggcaggcgaggctccaggcctccagagatccgtgaggaggaggtacagacggtggaggatggggtgtttgacatccacttgtaatagatggtgagtcctcccacagctggcaccagagctccccactgagggctgggggggagctggggagtatcagggaaatgggtgctttatccaaatggctccaagccaggtgggctactaccttgttgttaggggggtgtcttcctcacaacctgtttttctcttcccagctgtggttggatcaaggactcattcctgccttggagaaaatacttcaaccagagcagggagcctgggggtgtcggggcaggaggctggggatgggggtgggatatgagggtggcatgcagctgagggcagggccagggctggtgtccctaaggttgtacagactcttgtgaatatttgtattttcc

SEQ ID NO: 7994 - DNA, 557 bp, Homo sapiens
ggcttttacttctgataagctccaatgtgtgtttaatgaatacaaagccgcggtctgggtgccgcctcggccgcggccgctctcccgcgctcctttgccagaagaaaagattgatctctgggctggtgaacataatctctgtcccagtcagaaaaggagagaggaaattagcagagcgattggtggagaatgatatctgtcaaaagaaacacttggagagcactgagtttagtaataggtgactgccggaaaaaagggaactttgaatattgtcaagataaaccccacttgaaaaactgaggtgcttaaggagtaaaataatatgttcctggtggcatcctccagatcgtactgagaagcactccacaatgccagactcacctgtggatgtgaagacgcaatctaggctgactcctccaacaatgccacctcccccaactactcaaggagctccaagaaccagttcatttacaccgacaacgttaactaatggcacgagccattctcctacagccttgaatggcgccccctcaccacccaatggcttcagcaatggg

SEQ ID NO: 7995 - DNA, 551 bp, Homo sapiens
attcagattctagagctcattctgtgtggtagctctgcctttcattcactaattttttattgaggttttgtttcattgctcttctgaaggatagaaggcacagaggactggcccctacccccaagacagtttagcttggaagtaaagtcaatgtctccttacaggattgagcctttatgtatgtgccaaaaattatgtatttgtgtgccccaaatacaggggtatagatggcaacagagacatagaaagatggaggaggttactaggaactgaaggctctagaagacttcacagggaggcaggacacaatgtgtgagagaagtctgtcccattctctcctgtccccagcaccttagtcacatacccccaggacagtgctgccccaaatgtttgggtcagaggaaagtgtttgacctcccttttgggagctgcctctttcgaagtgatgtttatgacaatggatcctcatttctgtacgataactgcacagcttgtacctgcagggactctactgtggtttgcaagaggaagtgctcccaccctggtggctg

SEQ ID NO: 7996 - DNA, 580 bp, Homo sapiens
agccgctgcgcccgagctggcctgcgagttcagggctcctgtcgctctccaggagcaacctctactccggacgcacaggcattccccgcgcccctccagccctcgccgccctcggtccagacacggacctgccacattcaggagtgtgacaagagatttaaacaggatggtggctggagccactggtccccgtggtcatcttgttctgtgacatgtggtgatggtgtgatcacaaggatccggctctgcaactctcccagcccccagatgaacgggaaaccctgtgaaggcgaagcgcgggagaccaaagcctgcaagaaagacgcctgccccatcaatggaggctggggtccttggtcaccatgggacatctgttctgtcacctgtggaggaggggtacagaaacgtagtcgtctctgcaacaaccccacaccccagtttggaggcaaggactgcgttggtgatgtaacagaaaaccagatctgcaacaagcaggactgtccaattgatggatgcctgtccaatccctgctttgccggcgtgaagtgtactagctaccctgatggcagctggaaatgtg

SEQ ID NO: 7997 - DNA, 2158 bp, Homo sapiens
gcagagcagcaagtgctccgtgcagggctgttgctatcacttggaggtgaacagcctcttttgccggtattcagtgaagaaagcaagtctaaatatgcagttctctcactggagtgaaagatgttttgttcatttctaatcaactatgctagacagctgcaagctgaaaagtgcctgcaatttgccatttatttgtaataagaaaataataaacactgctggaaccagtaatgcagaagtccccttggctgatcccggaatgtaccagctggacattacattaagaaggggtcaaagtttagctgctcgagatcgaggagggacgagtgatccatatgtgaagtttaaaatcggaggaaaagaagtttttagaagtaagataatacacaagaacctcaaccctgtgtgggaagaaaaagcttgtattctggttgatcatcttagggagccattgtatataaaggtatttgactatgattttggactacaggatgactttatgggctcagcctttctggatctgacacaattggagttaaacaggcccacagatgtgacccttactctgaaagatcctcattatcctgaccatgatcttggaatcattttgctctcagtcatccttacccctaaagaaggagagtccagggatgtgacaatgctaatgaggaagagttggaaaagatcaagtaaggaactttcagaaaatgaagtggttggatcttatttctctgtgaagtctctcttttggaggacgtgcggcaggccagctcttcctgtcctgggcttctgcagagcagagcttcagaatccttattgcaaaaatgtacaatttcagacccaaagtttacgcctatcagacctacacagaaaatcgcatctttggagaggaatagtcagcatcaccttgattgaagggagagacctcaaggccatggattccaacgggttgagcgatccctacgtgaagttccggcttgggcatcagaagtacaagagcaagattatgccaaaaacgttgaatcctcagtggagggaacaatttgattttcacctttatgaagaaagaggaggagtcattgatatcactgcatgggacaaagatgctgggaaaagggatgatttcattggcaggtgccaggtcgacctgtcagccctcagtagggaacagacgcacaagctggagttgcagctggaagagggtgagggacacctggtgctgctggtcactctgacagcatcagccacagtcagcatctctgacctgtctgtcaactccctggaggaccagaaggaacgagaggagatattaaagagatatagcccattgaggatatttcacaacctgaaagatgtgggatttctccaggtgaaagtcatcagagcggaagggttaatggctgccgacgtcactggaaaaagtgacccattttgtgtggtagaactgaacaacgatagactgctaacacatactgtctacaaaaatctcaatcctgagtggaataaagtcttcacgttcaacattaaagatatccattcagttcttgaagtgacagtttatgatgaagatcgggatcgaagtgctgactttctgggcaaagttgctataccattgctgtctattcaaaatggtgaacagaaagcctacgtcttgaaaaacaagcagctgacagggccaacaaagggggtcatctatcttgaaatagatgtgatttttaatgctgtgaaagccagcttacgaacattaatacccaaagaacagaagtacattgaagaggaaaacagactctctaaacagctgctactaagaaactttatcagaatgaaacgttgtgtcatggtgctggtaaatgctgcatactacgttaatagttgctttgattgggattcacccccaaggagtctcgctgcttttgtggccttgtatgggactttcattaatgtctgagcacatggaacaaagagtgtctacgtccctttgtgttgtaagttaccagaaagttaggcagcctgcttcccatagacgtgttgttgtctccctaaagaaagcaattgtcattatcgttaagttttagaaaaaaaatctctctctctctgtctctctcagtattctttttgtagctctttcttataataaatatatggtggtactattaag

SEQ ID NO: 7998 - DNA, 2657 bp, Homo sapiens
atggctcagttctattacaaaagaaatgttaatgctccctatagagaccgcatccctctaaggatagtaagagcagaatcagaactctcgccatcagaaaaagcctacttgaatgctgtggaaaagggagattatgccagtgtcaagaaatccctagaggaagctgaaatttattttaaaatcaatattaattgcattgatcctctcggaagaactgctctcctcattgcaattgaaaatgagaacttggagctcatcgaactactcttaagctttaatgtctatgttggagatgctctattacatgctatcagaaaagaagtcgtcggagctgttgagctgttattgaaccacaaaaaacctagtggagaaaaacaggtgcctcctatactccttgataagcagttctctgaattcactccagacattacaccaatcattttggcagcccatacaaataattatgagataataaaactcttggttcagaaaggagtctcagtgcctcgaccccacgaggtccgctgtaactgtgtggaatgcgtgtccagttcagatgtggacagcctccgtcactcacgctccagactcaacatctacaaggccttggccagtccctctctcattgcactgtcaagcgaagatccttttctcacagcctttcagttaagttgggaacttcaggaactgagcaaggtggaaaatgaattcaagtcggagtatgaagagctgtcacggcagtgcaaacaatttgctaaggacctactggatcagacgagaagttccagagaactggaaatcattcttaattaccgagatgacaatagtctcatagaagaacaaagtggaaatgatcttgcaagactaaaattggccattaagtaccgtcaaaaagaggcttcatatggggagaaattaaacagatgtgggatggcggacttcaggactacatccatgattggtggaatctaatggactttgtaatgaactccttatatttagcaacaatctccttgaaaattgttgcatttgtaaagtacagtgcccttaatccacgagaatcatgggacatgtggcatcccactctggtggcagaggctttatttgctattgcaaacatcttcagttctctgcgtctgatctcactgtttactgcaaattctcacctgggacctctgcaaatatctctgggaagaatgctcctggacattttgaagtttctattcatatactgccttgtgttgctagcatttgcaaatggcctaaatcaattgtacttctattatgaagaaacgaaagggttaacctgcaaaggcataagatgtgaaaagcagaataatgcattttcaacgttatttgagacactgcagtccctgttttggtcaatatttgggctcatcaatttatatgtgaccaatgtcaaagcacagcatgaatttactgagtttgttggtgccaccatgtttgggacatacaatgtcatctctctggttgttctactcaacatgttaatagctatgatgaataattcttaccaactgattgctgaccatgcagatatagaatggaaatttgcacgaacaaagctttggatgagttattttgaagaaggaggtactctgcctactcccttcaatgtcatcccgagccccaagtctctctggtacctgatcaaatggatctggacacacttgtgcaagaaaaagatgagaagaaagccagaaagttttggaacaatagggaggcgagctgctgataacttgagaagacatcaccaataccaagaagttatgaggaacctggtgaagcgatacgttgctgcaatgattagagatgctaaaactgaagaaggcctgaccgaagagaactttaaggaactaaagcaagacatttctagtttccgctttgaagtcctgggattactaagaggaagcaaactttccacaatacaatctgcgaatgcctcgaaggagtcttcaaattcggcagactcagatgaaaagagtgatagcgaaggtaatagcaaggacaagaaaaagaatttcagcctttttgatttaaccaccctgattcatccgagatcagcagcaattgcctctgaaagacataacataagcaatggctctgccctggtggttcaggagccgcccagggagaagcagagaaaagtgaattttgtgaccgatatcaaaaactttgggttatttcatagacgatcaaaacaaaatgctgctgagcaaaatgcaaaccaaatcttctctgtttcagaagaagttgctcgtcaacaggctgcaggaccacttgagagaaatattcaactggaatctcgaggattagcttcacggggtgacctgagcattcccggtctcagtgaacaatgtgtgttagtagaccatagagaaaggaatacggacacactggggttacaggtaggaaagagagtgtgtccattcaagtcagagaaggtggtggtggaggacacggttcctataataccaaaggagaaacatgcaaaagaagaggactctagtatagactatgatctaaacctcccagacacagtcacccacgaagattacgtgaccacaagattgtgatacttgaaggaggaagcgtttaccatacacatacgtattttccgtagtgctctgggtggg

SEQ ID NO: 7999 - DNA, 601 bp, Homo sapiens
agctggagcccgcggagcccacggagcccacggagcccacggaggagcccacggaggagccccagcgtccgaacgggcagaccccctcgagccgcgaaggagcccgagaagcagccacgatgtgcggaatctttgcctacatgaactacagagtcccccggacgaggaaggagatcttcgaaaccctcatcaagggcctgcagcggctggagtacagaggctacgactcggcaggtgtggcgatcgatgggaataatcacgaagtcaaagaaagacacattcagctggtcaagaaaagggggaaagtcaaggctctcgatgaagaactttacaaacaagacagcatggacttaaaagtggagtttgagacacacttcggcattgcccacacgcgctgggccacccacggggtccccagtgctgtcaacagccaccctcagcgctcagacaaaggcaacgaatttgttgtcatccacaatgggatcatcacaaattacaaagatctgaggaaatttctggtaagatgcttcccctaggtgatgtctcagtccggtgggattggtctccccagaaactttccagccagctcatttccttgcgg

SEQ ID NO: 8000 - DNA, 3540 bp, Homo sapiens
gcaattaaagtcaagagctaaggagggagggagagggtttagaaataccagcataataagtagtatgactgggtgctctgtaaattaactcaattagacaaagcctgacttaacgggggaagatggtgagaagcgctaccctcattaaatttggttgttagaggcgcttctaaggaaattaagtctgttagttgtttgaatcacataaaattgtgtgtgcacgttcatgtacacatgtgcacacatgtaacctctgtgattcttgtgggtatttttttaagaagaaaggaatagaaagcaaagaaaaataaaaaatactgaaaagaaaagactgaaagagtagaagataaggagaaaagtacgacagagacaaggaaagtaagagagagagagagctctcccaattataaagccatgagccccctttggtgggggtttctgctcagttgcttgggctgcaaaatcctgccaggagcccagggtcagttcccccgagtctgcatgacggtggacagcctagtgaacaaggagtgctgcccacgcctgggtgcagagtcggccaatgtctgtggctctcagcaaggccgggggcagtgcacagaggtgcgagccgacacaaggccctggagtggtccctacatcctacgaaaccaggatgaccgtgagctgtggccaagaaaattcttccaccggacctgcaagtgcacaggaaactttgccggctataattgtggagactgcaagtttggctggaccggtcccaactgcgagcggaagaaaccaccagtgattcggcagaacatccattccttgagtcctcaggaaagagagcagttcttgggcgccttagatctcgcgaagaagagagtacaccccgactacgtgatcaccacacaacactggctgggcctgcttgggcccaatggaacccagccgcagtttgccaactgcagtgtttatgatttttttgtgtggctccattattattctgttagagatacattattaggtgggttttttccttggctgaaggtatattattacaggtttgtgattgggttgagggtatggcagtgggaagtaatttcatgcaagttaattaagagagcaaccacaaggcagccttaggtttatgaaagtcgtagaattatcaaataccgcctggagttagaaggaagcagtttcttcctgtgcattggatgcagacactttaaatgttctctcctctaccgtatgttcttggttcaaagtgtaaacttttctctgtgaagctgttaatcatcaaagatgtgagttggtgaggtggaggcgaattccttttgatttcagaagaaaatatttgcgaatctggccatggaagccctctctgaccttttctccaaattagaggaattaactgaacatgtgctaaggcacatgaagcttctttgtgcggaattagagtgctcatgttgggagtgggcatcttgttaaactcacaggatagatcaactttggatggattttagacagtctatcacatgatagactttcagataatcatttatggtactcctgcatggtccggaatccccaggtttcttggagctttattgtcaaggaaaagtacaagcttagccacagcaatgtagagtttctgctgcttagctctttgcaacacagtcatgttggatgcttgagaaattggtgacctgcccttccaagtcttaaaaattgggggctgggtaggacttggaatgagggggttgtctgttacaaacttcatgtatcaagtaggttcagctttgtccttatttttcagtcaaaggaaagccatagacaccaatgtattccaggagggcttgactccatcctagattcttcccatagcagttcttgaatgcatggctgcacgtgcacctctccccatttttggggtccttcattggggtcaggatgaatgaagacatcaagctcactttgaagagcaagattctgatttggacaggttcatccttctgctcatcacttgttccccttcaattgataccctctcgttgttgggttctgagaatttgaaaccttgctctgaattgaacatgaaaaagggccgtgtagccaacatcagggacagcagtgcttttctcagtgtgagtcttttaaaacttgccttacaggtaagcatctgtctgtctttatcgatagataaggaggctcttttggctataaacctttatagttttcctgttatcactctgaggaattattgctttatgagagagtactctctcaagaggaaaagaaagtcctagtttctggtcatagctacgaattaaatttatattcacgtctgttcagctctctgaagttgttataggtattttggacaagaactaaagttagctaaagtttccacataaccatcaaagctgttatgaaaaagggaagaaggatggaccaggcagtaaggaggtcattaaatcgtccagagcttttcactaaaattggcagttccagtgtccagcctaaatggcttgaatgtatttttctctcttctggtctcagcgaacatgcttgtcagctagtagttataacagattgatgggtgaggcaaaatacgcgaaagttctttttggttacataaatactgcattaggactaagtgcagttgaagttacaatattattaattaatccctcccttttaaatttatatctttgtgaagcataggttagcaaatgcctttaaaaaatatatttcctttaggtcttaatgatctattcttttggatagtctatttcacctgaatggattgttgcttacaaattaaatatgtatcaggggctcccaatcctgaaagtcacctgaatttcctggatctctgctagaaatcaaccttttaagagataaaggagggtttatcctaaaagtactagttacttctgaaattcatgtcattactattgcttttggagatataaataacaacaaaacttttttttcttactactataaaacatcatggacttattggctctatagatacagcccaggtaagatttaacattttaaaaaattctattctgtcatctctaatatgtttcccaattgtttcaggaccaggacgcccctacagggccatagatttctcacatcaaggacctgcatttgttacctggcaccggtaccatttgttgtgtctggaaagagatctccagcgactcattggcaatgagtcttttgctttgccctactggaactttgccactgggaggaacgagtgtgatgtgtgtacagaccagctgtttggggcagcgagaccagacgatccgactctgattagtcggaactcaagattctccagctgggaaactgtctgtgataggtaatggctcctgtacctgcaatggcatccagagattgtcttttctgatgtctgagacatggaggagaagtcactttatagtgctgtttcttatgcatgtggtgtcctatttacatgtttctaaaaacagttttcctctgggaggtgggatttcaaaaattcaaagctctttaatt

SEQ ID NO: 8001 - DNA, 461 bp, Homo sapiens
agagcgcggcgcggggcgggagcttggtggagcaggagcggctgggcatcctcctgagactccggggtcagacgcccactccagatttctttaaagactcgtgcagcacatcattatcgctggatgcccggacatgtaatacacctgacagcatgtgaagtgctcagaatggggcaggatgtcacctggaatcagcactaagtgattcagactttccttacttttaaatgtgctgctcttcatttcaagatgccgttgcagctctgataaatgcaaactgacaaccttcaaggccacgacggagggaaaatcattggtgcttggagcatagaagactgcccttcacaaaggaaatccctgattattgtttgaaatgctgaggacgttgctgcgaaggagacttttttcttatcccaccaaatactactttatggttcttgttttatccctaatcaccttct

SEQ ID NO: 8002 - DNA, 407 bp, Homo sapiens
atggcaagaaggcactggaggccatcagcagagagagaggcaccttcctgtatggtacccccacgatgttcgtggacattctgaaccagccagacttctccagttatgacatctcgaccatgtgtggaggtgtcattgctgggtcccctgcacctccagagttgatccgagccatcatcaacaagataaatatgaaggacctggtgaaatctcaggaagaaattgcagcatgggaagatggacagcaaagcaccgatgtcctgctagaacgtcctggcaggttgcttatggaaccacagagaacagtcccgtgacattcgcgcacttccctgaggacactgtggagcagaaggcagaaagcgtgggcagaattatgcctcacacggaggcccggatcatgaacatgg

SEQ ID NO: 8003 - DNA, 437 bp, Homo sapiens
ggttttctttggtcattgtttagagtctcgagtcctgatcatgtctttcttccgattccaaactgggagcacaaggagaaccctgagactgaagaagatgttgggccagttgttcagcacatctatgagctgagaaacaatggtccaagttcattcagcaaggcaatgctccatcttcagtggccttacaaatataataataacactctgttgtatatccttcattatgatattgatggaccaatgaactgcacttcagatatggagatcaaccctttgagaattaagatctcatctttgcaaacaactgaaaagaatgacacggttgccgggcaaggtgagcgggaccatctcatcactaagcgggatcttgccctcagtgaaggagatattcacactttgggttgtggagttgctcagtgcttgaagattgtctg

SEQ ID NO: 8004 - DNA, 701 bp, Homo sapiens
cagccccattattgagcatgaccctcggatgccagcctacatagccacgcagggcccgctgtcccataccatcgcagacttctggcagatggtgtgggagagcggctgcaccgtcatcgtcatgctgaccccgctggtggaggatggtgtcaagcagtgtgaccgctactggccagatgagggtgcctccctctaccacgtatatgagctggccggcagagggcacaccggcctccacgcggcccctgctggacttccgcaggaaggtgaacaagtgctaccggggccgctcctgccccatcatcgtgcactgcagtgatggtgcggggaggaccggcacctacatcctcatcgacatggtcctgaaccgcatggcaaaaggagtgaaggagattgacatcgctgccaccctggagcatgtccgtgaccagcggcctggccttgtccgctctaaggaccagtttgaatttgccctgacagccgtggcggaggaagtgaatgccatcctcaaggccctgccccagtgagaccctggggccccttggcgggcagcccagcctctgtccctctttgcctgtgtgagcatctctgtgtacccactcctcactgccccaccagccacctcttgggcatgctcagcccttcctagaagagtcaggaagggaaagccagaaggggcacgcctgcccagcctcgcatgc

SEQ ID NO: 8005 - DNA, 1275 bp, Homo sapiens
aaaaacgctgcccggggaaagtccgggcagagcccgagcagcggccagggtaacgctgtcttgtggacccgcacttcccacccgagacctctcactgagcccgagccgcgcgcgacatgagccacgggaagggaaccgacatgctcccggagatcgccgccgccgtgggcttcctctccagcctcctgaggacccggggctgcgtgagcgagcagaggcttaaggtcttcagcggggcgctccaggaggcactcacagagcactacaaacaccactggtttcccgaaaagccgtccaagggctccggctaccgctgcattcgcatcaaccacaagatggaccccatcatcagcagggtggccagccagatcggactcagccagccccagctgcaccagctgctgcccagcgagctgaccctgtgggtggacccctatgaggtgtcctaccgcattggggaggacggctccatctgcgtcttgtacgaggaggccccactggccgcctcctgtgggctcctcacctgcaagaaccaagtgctgctgggccggagcagcccctccaagaactacgtgatggcagtctccagctaggcccttccgcccccgccctgggcgccgccgtgctcatgctgccgtgacaacaggccaccacatacctcaacctggggaactgtatttttaaatgaagagctatttatatatattatttttttttaagaaaggaggaaaagaaaccaaaagttttttttaagaaaaaaaatccttcaagggagctgcttggaagtggcctccccaggtgcctttggagagaactgttgcgtgcttgagtctgtgagccagtctctgcctccttttcaactctccacattttgtattgccttcccagacctgcttccagtctttattgctttaaagttcactttgggcccacagacccaagagctaattttctggtttgtgggttgaaacaaagctgtgaatcactgcaggctgtgttcttgcatcttgtctgcaaacaggtccctgcctttttagaagcagcctcatggtctcatgcttaatcttgtctctcttctcttctttatgatgttcactttaaaaacaacaaaacccctgagctggactgttgagcaggcctgtctctcctattaagtaaaaataaatagtagtagtatgtttgtaagctattctgacagaaaagacaaaggttactaattgtatgatagtgtttttatatggaagaatgtacagcttatggacaaatgtacacctt

SEQ ID NO: 8006 - DNA, 677 bp, Homo sapiens
gaaattgggtattcttacatttttccagctctacataaagatggaacaagaagttcatgagccaaagaatgtggtagcctctacaagcttgaatggcaaggaaagggattctttcctagagcctccagaaaggaatgtcatccagtccaatacctggccttgatcttagcatattaagacccatgtcaacactcctgacatgcaaaactgtaaggtgtactagccctctcttggtacccacctgatgtaaatgatgaaaatggagaacctactgataacttggtacccactattttggataaagctcataaatataacctaaaggttacttttcacatagaaccatatagcaatcgagatgatcaaaacatgtacaaaaatgtcaagtatattatagacaaatatggaaatcatccggccttttacaggtacaagacgaagactggcaatgctcttcctatgttttatgtctatgattcctatattaccaagcctgaaaaatgggccaatctgttaaccacctcagggtctcggagtattcgcaattctccttatgatggactgtttattgcccttctggtagaagaaaaacataagtatgatattcttcaaagtggttttgatggaatttacacatattttgccacaaatggctttacttatggctcatcacatca

SEQ ID NO: 8007 - DNA, 589 bp, Homo sapiens
ttgtagccccagaggtggtaggccggcagcggtatggacgccctgtggactgctgggccattggagtcatcatgtacatcctgtgagtggacagatggacaagcaggcttgcagtcagatggggtgggggcatgtgtctgtggcctttctgtgtgacccttcccccatgcaggctttcaggcaatccacctttctatgaggaggtggaagaagatgattatgagaaccatgataagaatctcttccgcaagatcctggctggtgactatgagtttgactctccatattgggatgatatttcgcaggcagccaaagacctggtcacaaggctgatggaggtggagcaagaccagcggatcactgcagaagaggccatctcccatgagtggatttctggcaatgctgcttctgataagaacatcaaggatggtgtctgtgcccagattgaaaagaactttgccagggccaagtggaagaaggctgtccgagtgaccaccctcatgaaacggctccgggcaccagagcagtccagcacggctgcagcccagtcggcctcagccacagacactgccacccccggggctgcagg

SEQ ID NO: 8008 - DNA, 677 bp, Homo sapiens
aaccatggcttgttattctaccaaggcattaaacataaatgagagttgttttgcctttggtgttcaacaacttcatccagcccttatacaaagacctttcggggctcgtatacagttaagctaactgatcagaaggataccatgataagaggtggaatagttctgtttggaattaaactctgtaaccagtagactcagacacacaagctcagatggatacctgcccactatgtctatccgcaggcttttgtgcagccgggagtggtcattccacacgtccagccgacagcagctgccgcctccaccaccccttacattgattacactggagctgcatacgcacaatactcagcagctgctgctgctgccgccgccgctgctgcctatgaccagtacccctatgcagcctctccagctgctgcaggatatgttactgctgggggctatggctacgcagtccagcagccaatcaccgcagcggcacctgggacagctgccgccgccgctgcagcagctgctgccgctgcagcatttggccagtaccagcctcagcagctgcagacagaccgaatgcaatagaccagccatctgatcaaagttgaattgttttctctttccctcccaattttccaatttttagtagctaataagagagttaacattgacttaacagcttt

SEQ ID NO: 8009 - DNA, 2796 bp, Homo sapiens
gatatacctaatgttaaatgacgagttaacaggtgcagcacaccaacatggcactaacctgcacgttgtgcacatgtaccctaaaacttaaagtataatttaaaaaaaaaagaaaaagttgttagattttaaaattattttaggatattttcttataagagaatgcacttatttttctttgagattgcagctattttcgtttgatctagaatcttctcattcttttgatttttaattttattgttagtagattataaagaatgggatattagagatttttctttaaaaatgaacctatatacattttatttatttattttcttaaagatagggtctcactctgttgtccagctggagtgtaatggcagtcatagctcattacagcttcaaattgctgggttccaggggatcctcctacctcagcctcctgagtagctgggattacaggtgcaagccaccacacccagctgattttcaattttttggtagagatggagtctcactatattgcccagactggtctcgaactcctggcctcaagtgatccccattggcttcccaacgtgctaggattacaagcatgagacaggcttcctttttttccttttttttttaaaagcagttatctgatatccatcaccttgtttacttgaccctgcttttaaaaaaataagtatataaaagtaaatacgaattagagatttgttagattggtattcccagtggttttttaaaaacattaattgcaaaattcctgatgcttaccacattttagagccaggagttcttaatctgggctgagtgaactcctgggggaggggggtagtatgttctgaatagatgagccataactttcatcatattctcccagggggccacaagatggaaaaataaagaaccactattttagagcatttggatcaagctatgtaataactcatttgtctgtgttaaaggcatttctcattgcaattgtggtaccagatgttgagacattatgttcctgggcccaaaagagaggatttgaagggtcgtttgaggaactgtgcagaaataaggatgtcaaaaaagctatcctcgaagatatggtgagacttgggaaggattctggtctgaaaccatttgaacaggtcaaaggcatcacattgcaccctgaattattttctatcgacaatggccttctgactccaacaatgaaggcgaaaaggccagagctgcggaactatttcaggtcgcagatagatgacctctattccactatcaaggtttagtgtgaagaagaaagctcagaggaaatggcacagttccacaatctcttctcctgctgatggccttcatgttgttaattttgaatacagcaagtgtagggaaggaagcgttcgtgtttgacttgtccattcggggttcttctcataggaatgctagaggaaagagaacactgccttacagtcacctcatgttgcagaccatgtttatggtaatacacactttccaaaatgagccttaaaaattgtaaaggggatactataaatgtgctaagttatttgagacttcctcagtttaaaaagtgggttttaaatcttctgtctccctgtttctctaatcaaggggttaggactttgctatctctgagatgtctgctacttgctgcaaattctgcagctgtctgctgctctaaagagtacagtgcactagagggaagtgttccctttaaaaataagaacaactgtcctggctggagaatctcacaagcggaccagagatctttttaaatccctgctactgtcccttctcacaggcattcacagaacccttctgattcgtaagggttacgaaactcatgttcttctccagtcccctgtggtttctgttggagcataaggtttccagtaagcgggagggcagatccaactcagaaccatgcagataaggagcctctggcaaatgggtgctcatcagaacgcgtggattctctttcatggcagaatgctcttggactcggttctccaggcctgattccccgactccatcctttttcaggggttatttaaaaatctgccttagattctatagtgaagacaagcatttcaagaaagagttacctggatcagccatgctcagctgtgacgcctgaataactgtctactttatcttcactgaaccactcactctgtgtaaaggccaacagatttttaatgtggttttcatatcaaaagatcatgttgggattaacttgcctttttccccaaaaaataaactctcaggcaagcatttctttaaagctattaagggagtatatacttgagtacttattgaaatggacagtaataagcaaatgttcttataatgctacctgatttctatgaaatgtgtttgacaagccaaaattctaggatgtagaaatctggaaagttcatttcctgggattcacttctccagggattttttaaagttaatttgggaaattaacagcagttcactttattgtgagtctttgccacatttgactgaattgagctgtcatttgtacatttaaagcagctgttttggggtctgtgagagtacatgtattatatacaagcacaacagggcttgcactaaagaattgtcattgtaataacactacttggtagcctaacttcatatatgtattcttaattgcacaaaaagtcaataatttgtcaccttggggttttgaatgtttgctttaagtgttggctatttctatgttttataaaccaaaacaaaatttccaaaaacaatgaaggaaaccaaaataaatatttctgcatttca

SEQ ID NO: 8010 - DNA, 839 bp, Homo sapiens
ctgggtagtgtgtgtggacaagggatcttggccttgtagaggccaggggcttctgggttggacatgggacccttgtgatgaatgggacatggatggctttgcatcggctttgggtctgggcttaatgttgatgttcacagataaggccataccagtgtcctctgctgtatctgaggagacccaccataggtctggttccacccaaagtctgccccttcaggtctgcaatgacatcgatgaatgcaacgatggcaacaatggtggctgtgacccaaactccatctgcaccaacactgtgggctctttcaagtgtggtccctgccgcctgggtttcctgggcaaccagagccagggctgcctcccagcccggacctgccacagcccagcccacagcccctgccacatccatgctcactgtctctttgaacgcaatggtgcagtgtcctgccaggacaactgccttttgacacccaactctgggcaggaagatgctgataatgatggtgtgggggaccagtgtgatgatgatgctgatggggatgggatcaagaatgttgaggtgactcccagactgccctgccccttgaagctcctctcccctcctcctgtcctctctgtgcctcacttacctcatctggcagctctctagtaagggccaaatactccaaatcagggaggcaaaaacctcgtgcccaggacaaggaggctgggtgggtgggactgtactgagcagtttgtccatcacaagggtgtgatcttagaaaaggatacagagacaaggtaggtgcaagatgacaagtgatttaggggagacctgacccttcccctcccacccctct

SEQ ID NO: 8011 - DNA, 739 bp, Homo sapiens
gcccgggtcggggccccatgttcagagccctgccaccccagcttgagcgtggtctttggagcgttgccctgtgaaaaggggtgactttgccatgctccttcccagtctacctcctgttagttacagtttctcattcctcttgagtagcaggccctgtttctccacctaatccctgcaagtaaaccgtcccccaaatcaaaatgagttccatctggaactttgtaggattggtcctaagaagatcccgccgaatctcttcaccacttcctagcagagcacagtaaaaccggggactaagcaaagtggctgacatgtagtaagtgctcaagaaatggatgttgactagatgctacctctcatctttgcctgtctgaactctcaagcaccggatgcaagtagactgagagcctccgccaaccaggtctcgctctgtcacccaggctggagtgcgctggcataatcatggttcactgcaaccttgaactcctgggcttgagagatctatatgaattttaaggcacagtctcactctcttacccaatctggagtgcagtggtgtgatctcggctcactgcaacctctgcctcatgggttcaagcaattctcctgcctcagcctcccaagtagctgggattacaggctggagtgcagtggtgcaatctcggctcactacaacctccgcctcctgggttcaagtgattcttctgcctcagtctcttgaatagctgggattacaggt

SEQ ID NO: 8012 - DNA, 563 bp, Homo sapiens
gaactaggaactacggagagagaagccaagggagaggaggaggaggaaactaacgattccctgcccacccccacacccagcaccaccaacaggtgggcaagcttgccgagaaaacgcagagggcatcctgtgagcagcaaacacatctgagcctggaaaagacgcagagaagtaaaagatcaaagtctgattggcaccggctcccattccggctccagcctccaatccgacccccatttcggctgcagcctcggacctagctccggccctcggtctatccggttgcatcctccctccctgttccggatcttatcttgcgccagcgcctactccaggatcccgtagccagacctcaagccatggctggtcccttctcccgtctgctgtccgcccgcccgggactcaggctcctggctttggccggagcggggtctctagccgctgggtttctgctccgaccggaacctgtacgagctgccagtgaacgacggaggctgtatcccccgaggtaacagtgcctgaggcgcgggaggaggcgggggcaggaggtgatgggaacgaag

SEQ ID NO: 8013 - DNA, 7537 bp, Homo sapiens
atcacatttgtctgccacagcagcaacaacagaaaagcggagggagggagggaggcgggaggaggggagcagagctccgcaagtcttgggctctgcgtggaggttgcgtttggctggcgtccccgaccccgggctttttgcacggcagctctctctgcgcagcgccgggcggccgtagtcgctccgcggcgcgactccgcggtctcgtggcgagcgcgcgtgggcgagtggccgcggacactctggcctcgcgagggaagccgcgccgcgtcctcgccccgtcgccccgcgggccggccgagacgacgggaagttttatttgcagctcggagcctgtggcggatggtgggactctccggccctgtgcagtaaaagattgatctctgggctggtgaacataatctctgtcccagtcagaaaaggagagaggaaattagcagagcgattggtggagaatgatatctgtcaaaagaaacacttggagagcactgagtttagtaataggtgactgccggaaaaaagggaactttgaatattgtcaagatcgtactgagaagcactccacaatgccagactcacctgtggatgtgaagacgcaatctaggctgactcctccaacaatgccacctcccccaactactcaaggagctccaagaaccagttcatttacaccgacaacgttaactaatggcacgagccattctcctacagccttgaatggcgccccctcaccacccaatggcttcagcaatgggccttcctcttcttcctcctcctctctggctaatcaacagctgcccccagcctgtggtgccaggcaactcagcaagctgaaaaggttccttactaccctgcagcagtttggcaatgacatttcacccgagataggagaaagagttcgcaccctcgttctgggactagtgaactccactttgacaattgaagaatttcattccaaactgcaagaagctactaacttcccactgagaccttttgtcatcccatttttgaaggccaacttgcccctgctgcagcgtgagctcctccactgcgcaagactggccaaacagaaccctgcccagtacctcgcccagcatgaacagctgcttctggatgccagcaccacctcacctgttgactcctcagagctgcttctcgatgtgaacgaaaacgggaagaggcgaactccagacagaaccaaagaaaatggctttgacagagagcctttgcactcagaacatccaagcaagcgaccatgcactattagcccaggccagcggtacagtccaaataacggcttatcctaccagcccaatggcctgcctcaccctaccccacctccacctcagcattaccgtttggatgatatggccattgcccaccactacagggactcctatcgacaccccagccacagggacctcagggacagaaacagacctatggggttgcatggcacacgtcaagaagaaatgattgatcacagactaacagacagagaatgggcagaagagtggaaacatcttgaccatctgttaaactgcataatggacatggtagaaaaaacaaggcgatctctcaccgtactaaggcggtgtcaagaagcagaccgggaagaattgaattactggatccggcggtacagtgacgccgaggacttaaaaaaaggtggcggcagtagcagcagccactctaggcagcagagtcccgtcaacccagacccagttgcactagacgcgcatcgggaattccttcacaggcctgcgtctggatacgtgccagaggagatctggaagaaagctgaggaggccgtcaatgaggtgaagcgccaggcgatgacggagctgcagaaggccgtgtctgaggcggagcggaaagcccacgacatgatcacaacagagagggccaagatggagcgcacggtcgccgaggccaaacggcaggcggcggaggacgcactggcagttatcaatcagcaggaggattcaagcgagagttgctggaattgtggccgtaaagcgagtgaaacctgcagtggctgtaacacagcccgatactgtggctcattttgccagcacaaagactgggagaagcaccatcacatctgtggacagaccctgcaggcccagcagcagggagacacacctgcagtcagctcctctgtcacgcccaacagcggggctgggagcccgatggacacaccaccagcagccactccgaggtcaaccaccccgggaaccccttccaccatagagacaacccctcgctagacgtgaactcagaactgtcggaggaaagacaacacaaccaacgcgaaaccaattcctcatcctcagatgctcaaagttgttttttttgtttgtttgtttattagatgaattatcctatttcagtacttcagcaagagagaacctaactgtatcttgaggtggtagtaaaacacagagggccagtaacgggtcgtaatgacttattgtggataacaaagatatcttttctttagagaactgaaaagagagcagagaatataacatgaaatgatagatttgacctcctccctgttattttcaagtagctgggattttaaactagatgacctcattaaccgatgctttaccaaacagcaaaccaagagattgctaattgctgttgaaagcaaaaatgctaatattaaaagtcacaatgttctttatatacaataatggaaaaaaaaaaaagaggaaaaccctcaagggcatgagcattggatacagcagtagacattttaacaagaagatgaatggcgtccgtgggttgctaactgaactttgaagacccgctacaaaacgcgcagatgtgcagcagattggaaggagacacagatgttcggtttttttcctgtttctgaaaagaaataataatatccaggtcaacagaatgaaaaatgaaagatgatttgcaatgggatgtatgaatacagcagcaagaaaaaaaaatgccataatacaaaaggctccatatatatatatatatatatatatatacacacacacacacgcacatatacacacacacacacacacacacacacacacacacacacacacacacacacacacaagtaagagactcagcctgcagttaattagcattctggcagttttgacatcagccagctgccctaaataacccttcaacgtttcttcacttttgcaaggttccacagagtaagacattgggtctattccagctcattcattttatattgaaaaaaataattttaaaaatggtggcttcagctccagcccctttccaaaatttttcaaccccaccctgtttggatttttaattaaaaactagtagttctcttggtgttaaaacacttctgtcctgtgaggtttcccaatggtgtttttcttgtaaatgtgttggacaaatgtgaagatgcattgtagtttaaccatatgcccacatttagtctctttattcctagttggtgagaaacctgtatctttctatgctgcttttatatctgtatgtattagtgatatttctctagtagttaaaaaaaaaaaaaggaaaaaaagactctttttggttgtcctcaagaaaagaaaagaagaaaagctatctttcggagctgctatttcactctcttataggatttttttttttcctgaaaaccagcatgcttcacggaatgctaacatattggtgtttttgtaagagggatgtacataaatgtattttgcactgtcacaatgactccctaggcatgctttttgtttttttttttttttttttgagcaaattctttttaaatatgctagagccatttcatcaagtttagctgtagcatagagtagtcgtggaatttttcttttttttttttttaaatcattattagggacttttttaaaaaaataaaataacaagatatcctactttaaaaaaaaaggacagtgcatgcatattgctgtaaggtcgtttaagtatttctaattttacaaaagtaaaaatcattagagctccaaatgctgaggtgtagattgacagctttaacactgctgaatgccaggttatacagtattcttacaaaaagggaagtcagccaaagactgatctgatggaccaaaatcggaattttgaaaagcaccagtactactttccaaatgatcagcaggttaaacatgttcagcaaggtatagtatgaatccattaacccttcgttgtccagggtccagaccagaactacttgttagttttgaaaacagtagcccaggatgtggttgtgtgctttaggaaagtcagcagtgctgcaggctgtgtagacaaccaaagtttacaaggctgggaagacacttctccaaatacatatacaccaggcatttctttaaaatcaaaaacaatccattagctttggggcggggggtggggggagggttaaatgtaggccttggaaacagttttaagtggcttttaagtatctgcatagaggcaatcctaaggtttgctttaagtctcttaaatctaacatttttaaaagcatttcttccctgtattttcatatacaagttggttttaattttgtttgggtggtgttattttttttaaatgactttttagtttagaaagttctgatgagcaaataaatacatctatctacatgttggaagtccatctgccagcacacctgcttaaagtgaaatgaaagcacataaccaggctctgaatgggttatattttatcatggtgctcccagaatcctttgacctcactctgctttctagtctgcttgtgacactggacagtcctttcttacagagctattatatgttctaggctacgaagggttaaataatcccaaaaatgaggtatgtcatacccacacgtctttatctctagaagctgtgatgtatgtgaaacagcactgttattcttaacactagtgtgtaaaataaggattagtacagtacgtctcattactttttaattcagggcaccctgagtgaaaacaaatacaaaaaaaaatccctaactctgagctctatctctgattcctcttcctccttcccctcttcctcctcttcctctcctcctgttttgctacattctcctcagtggcaaaaagtttcactctacctctgacagcatgtatattgcaccagtagctaacaaaaactggtctagtcaaaccaaatgggcacaaaagaaccaggataccaaaagttaagctcatacagctgcaaaccatatcacttcttggtaacaatgcagacctcataaacctaaagaagagaaagaaaagaaaacttttgttactttccttttttgcttgtcacttatatacaggctatgtgagaatataatttgtaggtataacacattaagaaaaagttatcttcattggatagaattgaatggtggtcgctgataggaatagggcgtcctctagctcttatctctgtctcttactcttttctctttctctttttctctgtcatgagactgtgtgtgacagggccacctgtcttttttttttcttaaattttttttttttttatgtgtaggtgcatgtcttggggatttaaaaatttcaaggctggtttacttatgcaaagcatgcctacgtctggaatacttagggaaagaaagcgactccatgttgtccgaattcctcaagggacagaaaaaaaattggagactgttgaaatgcagatttgaagtaatttttttaaaatattattttgggttctgcgacattgtgaaaaattaaagttgttgtgcaatacttaattcagacatgtaccacaagttaatggtagactaacactggggggtggggtctaggcatcatgcttttgtcagcatactcttgagcttttaagtctactatgtctgaactgtggtttcttgtttatccttttttccttagttggactgtaatgtatggtctgtcaacctgtgaatctttaaagtatgattcaggtattgttgtattctttactgtgtaataaaaaagttgaaaaaaatctggatcctctgtctccctcgtccccggtgtgccatggttgcccaccagtgaccccagcctgaggagtccatcctccatggtgctgaatcaaatctgtagagtttattcagctacaaagcgtggctctgtaacaggagttggcttatccatgcgtgttgagtagggaatgatgtcagaactttgcaaaagtcgagctcattcataaggggatgtttctcaggcaggaggagtaggaagagtgggaggagaattactaccttccataggaaaggagagcttggcttgcctagattagctgctgcatagatagcagaggcccttttggctgtgttttgataaaattagaaatgagtacctaaatctggatcactctgctcagagaggttcgtgccaacctcatgaggctctgactcttgtcaggttgcttggctgccttgtgcatacccgaatggcagatcagctgacatgacatggaactgctctatctgccttgtcccctctcctctaattaaaagtcgctaccattgtcactcttggttatgtagttaatatccactgtggctatctccaacttgctgggacatccagttatctcctctgacacatattttttcattctctagttacaaagtttgttagagtttgaaaaacaaacccttctcccctaccctgtgaatgctgttagtttttatgtgtagttttcaaaacacagattatcttatatactgtgttgtagcagaaattcctgtttcctctgaatgttctgactttatagaccaaaataatcgttgcaaaaaatcaaggatggcacagcaggtgcatgagcccgtgtctggagaaaggttatgaaggtgaatgctggttacatgggagggtgacttggagccctctagtttccttcttgtgccagctgggttcctgtttcaaggccaggcttctctaacttgtcttcctgggaaatgtagcttttccaagaatttggtagtgcacaccaggaaaaactaggtatcagaacagatttttttttaaatagtggaaacaccctcactcccacactttggacagttagggttggatatttaatttcatagttactctttttttccacagaagaaaggccagcctgacccaagttgcctatttttaatgtgttactgcatcttattttctcttcaaagtgaaaaaggccagaaactagcagatagaaatggaacccgttgacttagttcccttataagaagttcttgcaaacacctctgtgacgttttcattcaagtggatatgttggacaaataggaaacagttttagtttacgcgaacagtatgagacttccaggtggtggacgccatttttttagaagtgttgatgatgtatttgataacattataaaagtatgtgtctcccgtgaaagaacattgagctatttccctggaatggatggggaagaaatgagcaaaggagtgctgttctgtatgggtgtctatacccttattccaaggtgaataaataaagttgtgtttgcc

SEQ ID NO: 8014 - DNA, 480 bp, Homo sapiens
cattaggtttcttgcttctcagaagacacctctccttggtctgggagggcttcagacacgggggttggctccgcacaacagcaagcgagctggtgggagtggcgtaaaggtgaacatgggtctcctccactgcgtggtggaggcagcttctttgcatttcttgaaatcacagactcctagagcactatgggttcagcagcaaatgagacagacacaaacccggaccctgcctttgtgccgctgaatgtcaggatgattatttcagaaactggaatcccaacaagccctttgaccaagccctggacccatccaaggacccctgcctgaaggtaaaatgcagccctcacaaagtgtgtgtgacccaggactaccagaccgccctgtgtgtcagccgcaagcacctgctccccaggcaaaagaaggggaacgtggcccagaaacactgggttggaccttcgaatttggtcaagtgcaagccct

SEQ ID NO: 8015 - DNA, 544 bp, Homo sapiens
actaaaatgaggaactcagcggaccgggagcgacgcagcttgagggaagcatccctagctgttggcgcagaggggcgaggctgaagccgagtggcccgaggtgtctgaggggctggggcaaaggtgaaagagtttcagaacaagcttcctggaacccatgacccatgaagtcttgtcgacatttataccgtctgagggtagcagctcgaaagtagaagaagtgggtgaggttttctcttcagtctgatagctctggcctattaggtcagccatttgttcatgttttgtgttaccacttagagatagtttttctcatcctcaagtattgggagtccaactttgagtggaatctggactaaacttcagagtgttgccagggacggcagtatctctttgtgtgaccctggcggcttatgggacgttggcttcagacctttgtgatacaccatgctgcgtgggacgatgacggcgtggagaggaatgaggcctgaggtcacactggcttgcctcctcctagccacagcaggctgctttgctgacttga

SEQ ID NO: 8016 - DNA, 1013 bp, Homo sapiens
tgtttacccgataaggaaggtcagcattcaaagtcaagaagcgccatttatcttcccgtgcgctctacaaatagttccgtgagaaagatggccgggaactcgatcctgctggctgctgtctctattctctcggcctgtcagcaaaacaaaactgtgtggagttttatcctatattcataattacattgtggatggctgggtggtatttcaaccaagtttttgctacttgtctgggtctggtgtacatatatggccgtcacctatacttctggggatattcagaagctgctaaaaaacggatcaccggtttccgactgagtctggggattttggccttgttgaccctcctaggtgccctgggaattgcaaacagctttctggatgaatatctggacctcaatattgccaagaaactgaggcggcaattctaactttttctcttccctttaatacttgcagaagctgttcccaccatgaaggcttgaagccacagtgcatggccagaaccagccagacctttggagttcaagaactcgagaggtgggtgaaaactgccattgcctccacagactgtcttctccgtggaaagaagacctgagtcaccagggctgggaaacctgcaccactgagacgagcacagcctctgccggcatgcaagtggccgctgtcaggacacatggactgaaagtggtttgtcagctgctccattaggttttttttacccatatgtttgctacctttctttccttgatttaaaaatagggagggggagcagtctcagctgtcttcagctgctagggagatttttttccccctcctgagctactgtttcccccaacccgagcctttctctcttattgtacccaccctttctgatgaagtcatcaaagcaaagattgcataactgatgcataggcctatcttgtgttatactgggagacaggccaatgtttccattaatagacaagagcaccaccacgctgccaaatggagctctctgctgcaaccactac

SEQ ID NO: 8017 - DNA, 512 bp, Homo sapiens
acatagcaaagcagctcagagttggatctaggggaaagcgctggaatccacgctccgcttccccacgcagcctcgcctgtggccccagcagcgccctctgcacatgggaggtcgggcagcttagcggagctccccggccagggactcaggcctcaccaggggcccgcgtgtccagcctgacgtgggccatctgaatcgaaatacacccatcttgctcaagacgaggcctagagagtcagtcactttaacgacaggtgaccttggaggtggccggcaggttcctggcgttggaggccagcacacacctgctggtgttcggcatggagcagcggctgccgcccaacagcgagctggtgcaggccgtgctgcggctcttccaggagccggtccccaaggccgcgctgcacaggcacgggcggctgtccccgcgcagcgcccgggcccgggtgaccgtcgagtggctgcgcgtccgcgacgacggctccaaccgcacctccctcatcgactccagg

SEQ ID NO: 8018 - DNA, 475 bp, Homo sapiens
atgaactttctgctgtcttgggtgcattggagccttgccttgctgctctacctccaccatgccaagtggtcccaggctgcacccatggcagaaggaggagggcagaatcatcacgaagtggtgaagttcatggatgtctatcagcgcagctactgccatccaatcgagaccctggtggacatcttccaggagtaccctgatgagatcgagtacatcttcaagccatcctgtgtgcccctgatgcgatgcgggggctgctgcaatgacgagggcctggagtgtgtgcccactgaggagtccaacatcaccatgcaggtgggcatctttgggaagtggggcaagggggggatagggaggggggtaacactttgggaacaggtggtcccaggtcgtttcctggctagatttgccttgtctggctcctgcccctgagttgcacaggggaggtatggtggggtcttgccttctgtggaga

SEQ ID NO: 8019 - DNA, 559 bp, Homo sapiens
agagggccaagaaatcgggcgccggcaccggcaaacagcagcacccgagcaaaccccagcaagatgcggaggctgcctcggcggagcagaggaaccacacgctgatcatggagcagcatccagttggacttccccgaaccacaggccccatgcagtcctccgtgcccccaggctcaggtggcatggtctcaggagccagtcccgcaggccccggcttcctgggcagccagccccaagcagccatcatgaagcagatgctcattgatcagcgggcccagttgatagagcagcagaagcaacagttcctgcgggagcaaaggcagcagcagcagcagcagcagcagcagattttggcggaacagcagttgcagcaatcacatctaccccggcagcacctccagccacagcggaatccatacccagtgcagcaggtcaatcagtttcaaggttctccccaggatatagcagccgtaagaagccaagcagccctccagagcatgcgaacgtcacggctgatggcacagaacgcaggcatgatgggaataggaccctcccagaa

SEQ ID NO: 8020 - DNA, 381 bp, Homo sapiens
agttttcacctatacaacactggagctcactgttggtcgtatgggagcaagaggccttctgtgaataagaaacagctaagccccagaaaataataaacactgctggaaccagtaatgcagaagtccccttggctgatcccggaatgtaccagctggacattacattaagaaggggtcaaagtttagctgctcgagatcgaggagggacgagtgatccatatgtgaagtttaaaatcggaggaaaagaagtttttagaagtaagataatacacaagaacctcaaccctgtgtgggaagaaaaagcttgtattctggttgatcatcttagggagccattgtatataaaggtatttgactatgattttggactacaggatgact

SEQ ID NO: 8021 - DNA, 2721 bp, Homo sapiens
acttgtgtgccattggaaggaaggtcagggcagggaatcctcgctacttcactactcatgtctctggattgggcttgcctctcttcttggggaagagccacttcttggggccctgcacacacgaggacgcatgtggaaagggtctgtaaatcgacacccgttctgctaaccgaaggtaatatatgctttaaacactaaaaatgatgagcatgaatctgcaattcaagccctcaaagatgctcatgaagaagaaattcaacaaattcttgctgaaacaagagaaaaaatattgcagtataaaagcaaagtaacagaggagctagaccttagaagaaagattcaagttttagaatcatcattagaagatcacataaaaatgaagcagcaggctttgacagaatttgaagcttataagcacagagttgaggacatgcaactttgtgcagaagcccagcatgtccaacgcatagtgaccatgtctagagaagtcgaagagattagaaggaaatttgaagaaaaattacggagctttggacaacttcaagtacagtttgaaaaagacaaacgattggcattggaagacttgcaagctgctcacagacgggagatacaagagctattgaagtcacagcaggatcacagtgcctcagtaaataaaggccaggaaaaggcagaggaactacacagaatggaggtggagtccctaaacaaaatgcttgaggagctaagacttgaacggaagaaactaattgaggattatgaaggcaagttgaataaagctcagtccttttatgaacgtgagcttgatactttgaaaaggtcacagctttttacagcagaaagcctacaggccagcaaagaaaaggaagctgatcttagaaaagaatttcagggacaagaagcaattttacgaaaaactataggaaaattaaagacagagttacagatggtacaggatgaagctggaagtcttcttgacaaatgccaaaagcttcagacggcacttgccatagcagagaacaatgttcaggttcttcaaaaacagcttgatgatgccaaggagggagaaatggccctattaagcaagcacaaagaagtggaaagtgagctagcagctgccagagaacgtttacaacagcaagcttcagatcttgtcctcaaagctagtcatattggaatgcttcaagcaactcaaatgacccaggaagttacaattaaagatttagaatcagaaaaatcgagagtcaatgagagattatctcaacttgaagaggaaagagcttttttgcgaagcaaaacccaaagtctggatgaagagcagaagcaacagattctagaactggagaagaaagtaaatgaagcaaagagaactcagcaagaatattatgaaagggaacttaaaaacctgcaaagtagattggaagaggaggtgactcaattaaacgaggcccattctaagactttggaagaattagcttggaagcaccatatggcaattgaagctgtccacagtaatgcaattagggataagaaaaaactgcaaatggatttggaagaacaacataacaaagataaactaaacctggaagaggataaaaatcagcttcaacaagagctagaaaacctaaaggaagtactggaagacaagttgaatacagccaatcaagagattggccacctccaagatatggtaaggaaaagtgaacaaggtcttggctctgcagaaggacttattgctagtcttcaggactcccaggaaaggcttcagaatgagcttgacttgactaaagacagcctaaaggagaccaaggatgctctattaaatgtggagcttctggtagcaccaggcattcttggcattcggcaacataatttccatctctgcctatcttcacatcttaaaaggataccaggcatattggaacaagggctcattctactccagtttgacatcatcttaacttaatacatctgtactgactgtatttccaaataaagtcacattctgaggtattgggagggtaggacttcggtatatctttttggggacccagttcaaccgataacaattggaacgtgcaattcttttactagtaagaggtagaactctcatatacagcaactaagtgcttctctgtgtctgcagatttcagaaagactctgccttttttcttccactcttatgaagcacagcaaagatttagattgtcttagatagtagagaaaaagaatccataaaactgggtgtatagtacccaggaagttcttaatcttttccttcagagagatggtttagagtataggctctgaagtcaggttggttgtatgtaaattctgaatccaccacatagtgtgtagctttgtgcaaagcctcaccttccacatctgcacaatgaaggagaggtggggggtaataacactcttcacagcactgttgtaataattaaatgagatgaaccatttatagcacagtgcttagcaaaatagtaaacactcagtaaatactgccttttactaatattatttcagattttcttttttagttcagaattggtgacatttcaaaagcatataaacaaggacactttagtgaatttaccttgtgtgtggggcatacataattctatttatattttatctatgatatattctgtgtgcattgaatatttaccttccattttgaattatgtgacaataaattacttcattttcctcgaatca

SEQ ID NO: 8022 - DNA, 1330 bp, Homo sapiens
atggagatttattccccagacatgtctgaggtcgccgccgagaggtcctccagcccctccactcagctgagtgcagacccatctcttgatgggcttccggcagcagaagacatgccagagccccagactgaagatgggagaacccctggactcgtgggcctggccgtgccctgctgtgcgtgcctagaagctgagcgcctgagaggttgcctcaactcagagaaaatctgcattgtccccatcctggcttgcctggtcagcctctgcctctgcatcgccggcctcaagtgggtatttgtggacaagatctttgaatatgactctcctactcaccttgaccctggggggttaggccaggaccctattatttctctggacgcaactgctgcctcagctgtgtgggtgtcgtctgaggcatacacttcacctgtctctagggctcaatctgaaagtgaggttcaagttacagtgcaaggtgacaaggctgttgtctcctttgaaccatcagcggcaccgacaccgaagaatcgtatttttgccttttctttcttgccgtccactgcgccatccttcccttcacccacccggaaccctgaggtgagaacgcccaagtcagcaactcagccacaaacaacagaaactaatctccaaactgctcctaaactttctacatctacatccaccactgggacaagccatcttgtaaaatgtgcggagaaggagaaaactttctgtgtgaatggaggggagtgcttcatggtgaaagacctttcaaacccctcgagatacttgtgcaagtgcccaaatgagtttactggtgatcgctgccaaaactacgtaatggccagcttctacagtacgtccactccctttctgtctctgcctgaataggagcatgctcagttggtgctgctttcttgttgctgcatctcccctcagattccacctagagctagatgtgtcttaccagatctaatattgactgcctctgcctgtcgcatgagaacattaacaaaagcaattgtattacttcctctgttcgcgactagttggctctgagatactaataggtgtgtgaggctccggatgtttctggaattgatattgaatgatgtgatacaaattgatagtcaatatcaagcagtgaaatatgataataaaggcatttcaaagtctcacttttattgataaaataaaaatcattctactgaacagtccatcttctttatacaatgaccacatcctgaaaagggtgttgctaagctgtaaccgatatgcacttgaaatgatggtaagttaattttgattcagaatgtgttatttgtcacaa

SEQ ID NO: 8023 - DNA, 509 bp, Homo sapiens
ccagcatttcttgggcaggattcttatgtggccatattttcttttctagctcctccctgctatatggatgtcattcctgaagatcaccgattggagagcccaaccactcctctgctagatgacatggatggctctcaagacagccctatctttatgtatgcccctgagttcaagttcatgccaccaccgacttatactgaggtggatccctgcatcctcaacaacaatgtgcagtgagcatgtggaagaaaagaagcagctttacctacttgtttctttttgtctctcttcctggacactcactttttcagagactcaacagtctctgcaatggagtgtgggtccaccttagcctctgacttcctaatgtaggaggtggtcagcaggcaatctcctgggccttaaaggatgcggactcatcctcagccagcgcccatgttgtgatacaggggtgtttgttggatgggtttaaaaataactagaaaaactcaggcccatccattttctca

SEQ ID NO: 8024 - DNA, 711 bp, Homo sapiens
ttatataagatgatcgattgctaatactggggattctcagccttgccctctgataaagtccatcttttaatggtgtgctaaccttattctgggctcctattctggtgaggggatcctgttaccatcctgagtattctttctctggtaaggggatcctgttacttttcagtgcttttattctgttgaggggactctgttattttagctgctttttatctagtgaggggactctgcttttatcttgagtgctcttaattgtggtgaggccatccttcctggagagtttggggttggagaagggcatcatgagattgagttggtctaacccctggcttgtgtgcagggacaagggtgtacagccccccagagtggatctctcgacaccagtaccatgcactcccggccactgtctggtcactgggcatcctcctctatgacatggtgtgtggggacattccctttgagagggaccaggagattctggaagctgagctccacttcccagcccatgtctccccagactgctgtgccctaatccgccggtgcctggcccccaaaccttcttcccgaccctcactggaagagatcctgctggacccctggatgcaaacaccagccgaggatgtacccctcaacccctccaaaggaggccctgcccctttggcctggtccttgctaccctaagcctggcctggcctggcctggccccca

SEQ ID NO: 8025 - DNA, 1683 bp, Homo sapiens
caaaggagtgcttgtggagatcggatcttttctccagcaattgggggaaagaaggctttttctctgacttcgcttagtgtaaccagcggcgtatattttttaggcgccttttcgaaaacctagtagttaatattcatttgtttaaatcttattttatttttaagctcaaactgcttaagaataccttaattccttaaagtgaaataattttttgcaaaggggtttcctcgatttggagctttttttttcttccacctctgtttctttctttaggtggatccctgcatcctcaacaacaatgtgcagtgagcatgtggaagaaaagaagcagctttacctacttgtttctttttgtctctcttcctggacactcactttttcagagactcaacagtctctgcaatggagtgtgggtccaccttagcctctgacttcctaatgtaggaggtggtcagcaggcaatctcctgggccttaaaggatgcggactcatcctcagccagcgcccatgttgtgatacaggggtgtttgttggatgggtttaaaaataactagaaaaactcaggcccatccattttctcagatctccttgaaaattgaggccttttcgatagtttcgggtcaggtaaaaatggcctcctggcgtaagcttttcaaggttttttggaggctttttgtaaattgtgataggaactttggaccttgaacttatgtatcatgtggagaagagccaatttaacaaactaggaagatgaaaagggaaattgtggccaaaactttgggaaaaggaggttcttaaaatcagtgtttcccctttgtgcacttgtagaaaaaaaagaaaaaccttctagagctgatttgatggacaatggagagagctttccctgtgattataaaaaaggaagctagctgctctacggtcatctttgcttaagagtatactttaacctggcttttaaagcagtagtaactgccccaccaaaggtcttaaaagccatttttggagcctattgcactgtgttctcctactgcaaatattttcatatgggaggatggttttctcttcatgtaagtccttggaattgattctaaggtgatgttcttagcactttaattcctgtcaaattttttgttctccccttctgccatcttaaatgtaagctgaaactggtctactgtgtctctagggttaagccaaaagacaaaaaaaattttactacttttgagattgccccaatgtacagaattatataattctaacgcttaaatcatgtgaaagggttgctgctgtcagccttgcccactgtgacttcaaacccaaggaggaactcttgatcaagatgccgaaccctgtgttcagaacctccaaatactgccatgagaaactagagggcaggtcttcataaaagccctttgaacccccttcctgccctgtgttaggagatagggatattggcccctcactgcagctgccagcacttggtcagtcactctcagccatagcactttgttcactgtcctgtgtcagagcactgagctccacccttttctgagagttattacagccagaaagtgtgggctgaagatggttggtttcatgtttttgtattatgtatctttttgtatggtaaagactatattttgtacttaaccagatatatttttaccccagatggggatattc

SEQ ID NO: 8026 - DNA, 1616 bp, Homo sapiens
agcggaccgggagcgacgcagcttgagggaagcatccctagctgttggcgcagaggggcgaggctgaagccgagtggcccgaggtgtctgaggggctggggcaaaggtgaaagagtttcagaacaagcttcctggaacccatgacccatgaagtcttgtcgacatttataccgtctgagggtagcagctcgaaagtagaagaagtggagtgttgccagggacggcagtatctctttgtgtgaccctggcggcttatgggacgttggcttcagacctttgtgatacaccatgctgcgtgggacgatgacggcgtggagaggaatgaggcctgaggtcacactggcttgcctcctcctagccacagcaggctgctttgctgacttgaacgaggtccctcaggtcaccgtccagcctgcgtccaccgtccagaagcccggaggcactgtgatcttgggctgcgtggtggaacctccaaggatgaatgtaacctggcgcctgaatggaaaggagctgaatggctcggatgatgctctgggtgtcctcatcacccacgggaccctcgtcatcactgcccttaacaaccacactgtgggacggtaccagtgtgtggcccggatgcctgcgggggctgtggccagcgtgccagccactgtgacactagccaatctccaggacttcaagttagatgtgcagcacgtgattgaagtggatgagggaaacacagcagtcattgcctgccacctgcctgagagccaccccaaagcccaggtccggtacagcgtcaaacaagagtggctggaggcctccagaggtaactacctgatcatgccctcagggaacctccagattgtgaatgccagccaggaggacgagggcatgtacaagtgtgcagcctacaacccagtgacccaggaagtgaaaacctccggctccagcgacaggctacgtgtgcgccgtaaggcccgggcccacctgctgggggatgggggatcactgatggaagggctcacaaagatggaaagggaggtagatacctggaggtgccacatccaagctccagttctgtgtgcactggctttggccagggggacagccaggggttctcagccagggattctctcccctctggccggcctcagggccagcatctcacagcacacagcaccaggcgactgcctgctgccacacctgcctgatgggaggtttccttcacggttactttgcgattgggatgggtcagaatgtgtgtgctgggacaggacggtgggtcttgtctcaagctcagcagcggacacagcatgtgcctagaacagatggccacgtgggaggcctccaggctgctgttctgccctatatgaggtccctgggcctgcactctctgcactgatgaggtgtgccctgcaccaccctctggtgagcttccgggaggcccacatgctctcaatgcacaggaaaacagcagctacctttctgtgcgcttgcctggatccctgccaattcaaaggagtgacatcttacacggagttaggcttagagttggcaccagagatggaatcactgtgaagctaatgaagttaaacttccatcgtctttcactcactgacagaagcctcaca

SEQ ID NO: 8027 - DNA, 554 bp, Homo sapiens
gtgcagccaggggcttccggccgcggccctggcgcgtggtctgcgcgcgcccggccgtgcgtgcggatgcggggaggctgcgtgtgtgcgcagggagagaacgccggccaccttcccgcttccgagctgggtgcgcgccgagcacaggagggtgcaatacctgccttgcgtcgcccgtgccgctccagccaccgtcaaatccgggtagcgacccggggcgtttgcagcggtgccgaggaagaggacgggaacggtgttacgattgcctgcgtttaggaggtggctgcgttgtgggaaaagctatcaaggaagaaattgccaaaccatgtctttttttctgttttcagagtagttcacaacagatctgagtgttttaattaagcatggaatacagaaaacaacaaaaaacttaagctttaatttcatctggaattccacagttttcttagctccctggacccggttgacctgttggctcttcccgctggctgctctatcacgtggtgctctccgactactcaccccgagtgtaaagaaccttcggctcgcgtgct

SEQ ID NO: 8028 - DNA, 1291 bp, Homo sapiens
gtgtgccagacatcgatgacatctgtcctgagaatgttgacatcagtgagaccgatttccgccgattccagatgattcctctggaccccaaagggacatcccaaaatgaccctaactgggttgtacgccatcagggtaaagaactcgtccagactgtcaactgtgatcctggactcgctgtaggttatgatgagtttaatgctgtggacttcagtggcaccttcttcatcaacaccgaaagggacgatgactatgctggatttgtctttggctaccagtccagcagccgcttttatgttgtgatgtggaagcaagtcacccagtcctactgggacaccaaccccacgagggctcagggatactcgggcctttctgtgaaagttgtaaactccaccacagggcctggcgagcacctgcggaacgccctgtggcacacaggaaacacccctggccaggtaagaagcaaagccctggaacagagagagagcttatgggtgcctgactagcactggggatgctgtgctttgaccaagactctgaccagggagtcttagaaagttcccagcatcaccagctgcagcattgaactctgctttgtaaaaacataatagtgttgaaaagggagcttgaccaagaattgccctgcaaatcctaaggtgccttcagccttttcaaacaaaaaaacctccttccctcctctctgtctgctttatatgtgtgctcagtggcacacaacaaatatgagaggacttggaaaaattccccattgcagccctctaacttagatcagctcagtacctttcaagcattgtttctgatggaatgaaatagaaatctttacctgaaggagctgtgtttcaacctttccttttccttttccttcaggtgcgcaccctgtggcatgaccctcgtcacataggctggaaagatttcaccgcctacagatggcgtctcagccacaggccaaagacgggtttcattagagtggtgatgtatgaagggaagaaaatcatggctgactcaggacccatctatgataaaacctatgctggtggtagactagggttgtttgtcttctctcaagaaatggtgttcttctctgacctgaaatacgaatgtagagatccctaatcatcaaattgttgattgaaagactgatcataaaccaatgctggtattgcaccttctggaactatgggcttgagaaaacccccaggatcacttctccttggcttccttcttttctgtgcttgcatcagtgtggactcctagaacgtgcgacctgcctcaa

SEQ ID NO: 8029 - DNA, 573 bp, Homo sapiens
agagcacctgagaggatctcggcgaagcggaaggctttggtgccagctgggagagtctgcgccggatttcctcagctccttggcgcgtttcctcggagccgggggaggcaaagcacggaccccggagtcggcgcccatagcgggacgccctcgcgaggggcgggagtgcgggagagccgagctgctgcccttgactggtgctcaggggaccacagctgcaatgacagtttgggcctgcaaaaagaaggctggaacaacgggagatggaagctttctgcaaatgcaccactggtatccatgaatttaacctgcccatcattcttcctaaacaagagactattgaaaagtcagggtgttcaaaatggcttcagatcttatcaggacaatcttggctgttgcactaatttccaaacttggcacagctgtagatgcagaactgatgccatctggtgcgattctacagaataagagagaaaatttacccagagtgtgccatgcactggcttttctgggaatggcaaggtgccaggatttgtttttggttcgcttgcaggggtggaaacttggaactag

SEQ ID NO: 8030 - DNA, 568 bp, Homo sapiens
agaccgcggccgccgcagccggcgaaagaggcaaagtcccgcacgccggaggacatgcgcctcggctagcggccccgggccccaccaccgtgcggctttctccagattattcctctctcgctgtctctgactgtctctctctgtctctgtctctgtctctctctctctcacacacacacacacacacacaaacacacatacgcacgcacgatctcacttcgatctatacactggaggattaaaacaaacaaacaaaaaaaacatttccttcgctccccctccctctccactctgagaagcagaggagccgcacggcgaggggccgcagaccgtctggaaatgcgaatcctaaagcgtttcctcgcttgcattcagctcctctgtgtttgccgcctggattgggctaatggatactacagacaacagagaaaacttgttgaagagattggctggtcctatacagaaagaaaagcattcagaagaatataaaatgaaaactacactgccactcctttcttccttgtgatggccatggaaatgctagcgtttaaccagagacttggactct

SEQ ID NO: 8031 - DNA, 364 bp, Homo sapiens
atgatgatcctgcaggtttcagggggcccctggacagtggctctgacagcattactgatggtgctgctcatatctgtggtccagagcagggccactccagagaattccgtctaccaggaacggcaggaatgctatgcgttcaatgggactcagcgcgttgtggacgggctcatctacaaccgggaggaatacgtgcattttgacagcgcagtgggggagttcctagcagtgatggagctggggcggcccataggcgagtacttcaatagccagaaggactttatggaacggaagcgagccgaggtggacaaggtgtgcagacacaagtacgagctgatggagccactcatccggcagcgccgag

SEQ ID NO: 8032 - DNA, 573 bp, Homo sapiens
agatttgtttcctaaatcgtggtgcacccagcaaagcaacaaagctgtctggctcccattcttgtccactggaatgagcccaagtccctcgagctatcggcaggaccctcatcccccgttactttagcactgtgtttgaaggaggggtgaccgacctgtattacattctcaaacactcgaaagagtcataccacaactcatccatcacggtggactgcgaccagtgtaccatggtcacccagcacgggaagcccatgtttaccaaggtatgtacagaaggcagactgatcttggagttcacctttgatgatctcatgagaatcaaaacatggcactttaccattagacaataccgagagttagtcccgagaagcatcctagccatgcatgcacaagatcctcaggtcctggatcagctgtccaaaaacatcaccaggatggggctaacaaacttcaccctcaactacctcaggttgtgtgtaatattggagccaatgcaggaactgatgtcgagacataaaacttacaacctcagtccccgagactgcctgaagacctgcttgtttcagaagt

SEQ ID NO: 8033 - DNA, 6390 bp, Homo sapiens
cggattcatcctcaggacctaaagttgcccaaggagctcctgctctgccagaggagggtggagagggcggtgggaggcgtgtgcctgagtgggctctactgccttgttccatattatttggtgcacattttccctggcactctgggttgctagccccgccgggcactgggcctcagacactgcgcggttccctcggagcagcaagctaaagaaagcccccagtgccggcgaggaaggaggcggcggggaaagatgcgcggcgttggctggcagatgctgtccctgtcgctggggttagtgctggcgatcctgaacaaggtggcaccgcaggcgtgcccggcgcagtgctcttgctcgggcagcacagtggactgtcacgggctggcgctgcgcagcgtgcccaggaatatcccccgcaacaccgagagactggatttaaatggaaataacatcacaagaattacgaagacagattttgctggtcttagacatctaagagttcttcagcttatggagaataagattagcaccattgaaagaggagcattccaggatcttaaagaactagagagactgcgtttaaacagaaatcaccttcagctgtttcctgagttgctgtttcttgggactgcgaagctatacaggcttgatctcagtgaaaaccaaattcaggcaatcccaaggaaagctttccgtggggcagttgacataaaaaatttgcaactggattacaaccagatcagctgtattgaagatggggcattcagggctctccgggacctggaagtgctcactctcaacaataacaacattactagactttctgtggcaagtttcaaccatatgcctaaacttaggacttttcgactgcattcaaacaacctgtattgtgactgccacctggcctggctctccgactggcttcgccaaaggcctcgggttggtctgtacactcagtgtatgggcccctcccacctgagaggccataatgtagccgaggttcaaaaacgagaatttgtctgcagtggtcaccagtcatttatggctccttcttgtagtgttttgcactgccctgccgcctgtacctgtagcaacaatatcgtagactgtcgtgggaaaggtctcactgagatccccacaaatcttccagagaccatcacagaaatacgtttggaacagaacacaatcaaagtcatccctcctggagctttctcaccatataaaaagcttagacgaattgacctgagcaataatcagatctctgaacttgcaccagatgctttccaaggactacgctctctgaattcacttgtcctctatggaaataaaatcacagaactccccaaaagtttatttgaaggactgttttccttacagctcctattattgaatgccaacaagataaactgccttcgggtagatgcttttcaggatctccacaacttgaaccttctctccctatatgacaacaagcttcagaccatcgccaaggggaccttttcacctcttcgggccattcaaactatgcatttggcccagaacccctttatttgtgactgccatctcaagtggctagcggattatctccataccaacccgattgagaccagtggtgcccgttgcaccagcccccgccgcctggcaaacaaaagaattggacagatcaaaagcaagaaattccgttgttcagctaaagaacagtatttcattccaggtacagaagattatcgatcaaaattaagtggagactgctttgcggatctggcttgccctgaaaagtgtcgctgtgaaggaaccacagtagattgctctaatcaaaagctcaacaaaatcccggagcacattccccagtacactgcagagttgcgtctcaataataatgaatttaccgtgttggaagccacaggaatctttaagaaacttcctcaattacgtaaaataaactttagcaacaataagatcacagatattgaggagggagcatttgaaggagcatctggtgtaaatgaaatacttcttacgagtaatcgtttggaaaatgtgcagcataagatgttcaagggattggaaagcctcaaaactttgatgttgagaagcaatcgaataacctgtgtggggaatgacagtttcataggactcagttctgtgcgtttgctttctttgtatgataatcaaattactacagttgcaccaggggcatttgatactctccattctttatctactctaaacctcttggccaatccttttaactgtaactgctacctggcttggttgggagagtggctgagaaagaagagaattgtcacgggaaatcctagatgtcaaaaaccatacttcctgaaagaaatacccatccaggatgtggccattcaggacttcacttgtgatgacggaaatgatgacaatagttgctccccactttctcgctgtcctactgaatgtacttgcttggatacagtcgtccgatgtagcaacaagggtttgaaggtcttgccgaaaggtattccaagagatgtcacagagttgtatctggatggaaaccaatttacactggttcccaaggaactctccaactacaaacatttaacacttatagacttaagtaacaacagaataagcacgctttctaatcagagcttcagcaacatgacccagctcctcaccttaattcttagttacaaccgtctgagatgtattcctcctcgcacctttgatggattaaagtctcttcgattactttctctacatggaaatgacatttctgttgtgcctgaaggtgctttcaatgatctttctgcattatcacatctagcaattggagccaaccctctttactgtgattgtaacatgcagtggttatccgactgggtgaagtcggaatataaggagcctggaattgctcgttgtgctggtcctggagaaatggcagataaacttttactcacaactccctccaaaaaatttacctgtcaaggtcctgtggatgtcaatattctagctaagtgtaacccctgcctatcaaatccgtgtaaaaatgatggcacatgtaatagtgatccagttgacttttaccgatgcacctgtccatatggtttcaaggggcaggactgtgatgtcccaattcatgcctgcatcagtaacccatgtaaacatggaggaacttgccacttaaaggaaggagaagaagatggattctggtgtatttgtgctgatggatttgaaggagaaaattgtgaagtcaacgttgatgattgtgaagataatgactgtgaaaataattctacatgtgtcgatggcattaataactacacatgcctttgcccacctgagtatacaggtgagttgtgtgaggagaagctggacttctgtgcccaggacctgaacccctgccagcacgattcaaagtgcatcctaactccaaagggattcaaatgtgactgcacaccagggtacgtaggtgaacactgcgacatcgattttgacgactgccaagacaacaagtgtaaaaacggagcccactgcacagatgcagtgaacggctatacgtgcatatgccccgaaggttacagtggcttgttctgtgagttttctccacccatggtcctccctcgtaccagcccctgtgataattttgattgtcagaatggagctcagtgtatcgtcagaataaatgagccaatatgtcagtgtttgcctggctatcagggagaaaagtgtgaaaaattggttagtgtgaattttataaacaaagagtcttatcttcagattccttcagccaaggttcggcctcagacgaacataacacttcagattgccacagatgaagacagcggaatcctcctgtataagggtgacaaagaccatatcgcggtagaactctatcgggggcgtgttcgtgccagctatgacaccggctctcatccagcttctgccatttacagtgtggagacaatcaatgatggaaacttccacattgtggaactacttgccttggatcagagtctctctttgtccgtggatggtgggaaccccaaaatcatcactaacttgtcaaagcagtccactctgaattttgactctccactctatgtaggaggcatgccagggaagagtaacgtggcatctctgcgccaggcccctgggcagaacggaaccagcttccacggctgcatccggaacctttacatcaacagtgagctgcaggacttccagaaggtgccgatgcaaacaggcattttgcctggctgtgagccatgccacaagaaggtgtgtgcccatggcacatgccagcccagcagccaggcaggcttcacctgcgagtgccaggaaggatggatggggcccctctgtgaccaacggaccaatgacccttgccttggaaataaatgcgtacatggcacctgcttgcccatcaatgcgttctcctacagctgtaagtgcttggagggccatggaggtgtcctctgtgatgaagaggaggatctgtttaacccatgccaggcgatcaagtgcaagcatgggaagtgcaggctttcaggtctggggcagccctactgtgaatgcagcagtggatacacgggggacagctgtgatcgagaaatctcttgtcgaggggaaaggataagagattattaccaaaagcagcagggctatgctgcttgccaaacaaccaagaaggtgtcccgattagagtgcagaggtgggtgtgcaggagggcagtgctgtggaccgctgaggagcaagcggcggaaatactctttcgaatgcactgacggctcctcctttgtggacgaggttgagaaagtggtgaagtgcggctgtacgaggtgtgtgtcctaaacacactcccggcagctctgtctttggaaaaggttgtatacttcttgaccgtgtgggactaatgaatgcttcatagtggaaatatttgaaatatattgtaaaatacagaacagacttatttttattatgagaataaagactttttttctgcatttggaaaaaaaaaaaaagaaatgcttgaactaaagcttcccctatgctggagaagtatgaagaaagatatacctggagacattagaacagcgatgggaaccattgcaactcgggtccatctttgtaacatgctgaagacaagcagaagcacatgcacgagggacagaggagctactgtgcactgctgtgaaattgcccagagcataaaacctgtgtaccctccttcacatcaaccaagttcactaggacataccaagcacatgcgtgtgaatgaggatgcaaggcaagagaatggaactccagaattcacagatagaacaaatggatgagaaatatttcatgcaaaatataaagtgtcctgaggatctgggttccatttacgagaggaaatgaaagtgctaaaataaattttatcttccttttaaatgtcagcatgtcagcagaagcagcacacaaaagtctttaccattttccagtattaatttttttgtaatataaatgataaaggagatgataaagaaccaatagattattgataaataaattagtaataatatgattttttgtttctatgagttctaaacagccctatacagtattcagtttccatgagaaatatttattgtatcaaagtacattgtacttaacattttaggccatccttttactgttccttgatgctttaatatatattaatttataattatcctgatatttttgtacatttttcaaacttaaaaatcaggatttttttttttttttttttggcaatagtactaacatagggttttatcttgggatacatatgtattggtctgtttgttgaccttgacatctgatcactgatgtcaatgacctactggcctcattcaggacacctgcagagagtatgcaaagtccgagagaggaaaacagaaatctgtatgtgagatggtcattgtacagaaagaagtggcccctctgcaacatgtcctcacagaaacgaaatggtgtgtagcaatcaacactagaaagtagaccttttgcaaattaatatgtccttgaccttttttgcccttttgtgggggtgaggtggggataaaaagactgtcatatcaagaactgtgacttttctttccctcaaacaataaaactcctttattatcttaatgctcccatgttaacatgtttgctgctaaattacaatgtagaattgataatggtttatagtgaactgtgctcttccctcattaaaatcccagggtgccctgtaaagatgcagatgtttcttcctgaaaacttctttttttacaaagaaaattagatgtacatgtataattcagtgtgctttgtctttctccagattaatatcggttacactgctgatgtttgtaaattaaacagatatttacttca

SEQ ID NO: 8034 - DNA, 2063 bp, Homo sapiens
ggggcgggacccaactgattgtcaaaggcggcagattgtagtttttgttttggccggaaaggcttaccatgagttgccagggctgagagagatggagaaggattcgcggcggtgacagattaaattccccagttacattatagacttggagacttgtccttgtgtggacgggagccggaaagccttgagaacttattcctcgacccggacatggcacaggagaaaatgaaactaggtttcaagtcgctgccgagttccactaccgcagacggcaacattctgagaagagtcaacagtgcccctttgatcaatggacttggttttaattcacaggtgttgcaagctgacatgttaagaattaggacaaacagaacaacatttaggaatcgacgctctctggaaattacttcacccacttctgttgaacagaagcccaaagacctcttctgaccttgagactatgccttctcccaaatcgcccctttgctttatctcctaagaactctgaagttgccatgcctgttcctttctctcccaccaggaattctggcacttctgctcaagccggatgtcactgcgtcacttctccatccccaccccctcctcttccaaaggaagcaggggaaatgtctcatcttcctaagagaaaaggttgtgcttttcttgagcaattcatctgttctaattttaggcctactgacatctgtctcattaggttttgcttttcctattggcaaccacaaaccccaaatctagtgtatggcccacaaagttgcaagcatgtaatacattcctgatcctgctttatgccctgcacatctagcccatgttcagttcatgttaagtagcattataaaccatcttaaatcatttctgaaactaggcagagacatttataaacacagtgtacaaccctttgtttaggattttctgagcattttatctctagttactatagtaggaaatggcttaaaaacagcaaacctaggaaaatgaaaaataatttttaaaaatcttaatgtctttacaatatgaattttctgtgatctctcttaaatggaactaagcttggtttttcctcctatcttaatcctttcactggagataattcttagtaattagcttcacccagcaccctccctaacctcccgctacttctactcccagccaccttcacaccatgacatcattccttggtgctgatactcttggttccttccaaggacttttctttcttcctggagtgtgagaaaaaggcacagtgggaaatttacacaaaagataccagtgatgtttattacatctcagtgaagtcattatttctattttaatactttgtttcatgtggaaaaattatctaaggtaattcctttgcaaacgccacttgtagtacttaatttggggagaattctcttccagaagccttgttttctgcaattaatttctcacattattactaaaagaatcagccaatacaagatttgatccacattttgtccaattaaaaaattcttgtagcttatgattctgtagctcaagttcaaatcctacctacctcagacatttcacactatctccctgctggtgtcatcaatttcagtctatcttctcatgatttcctggatgaagtttttcagtgggaaatcctaagcctttgcctgaacctaaattggttccttcccatcccttaggtataaattaaaaataatctcttctagggaagtctttcatcattattttatgaaggaaatttgccataccatgttttctcacttataagtcggagctaaatgataagaacttatgaacacaaggaaacaacagacactagggtctacttgagcggggaggatgtgaggagggaagcagaaaagataactattaggtactgggcttactacctgggtgatgaaatagtatgtacaacaggccaggcgcggtggctcacacctgtaatcccagcactttggaaggccaaggtgggcagatcacctgaggtcaggagtttgagatcagcctggtcaacatggtgaaaccccatctctactaaaaatacaaaaaaa

SEQ ID NO: 8035 - DNA, 2063 bp, Homo sapiens
actctggcaccactctccaggctgccatggggcccagcacccctctcctcatcttgttccttttgtcatggtcgggacccctccaaggacagcagcaccaccttgtggagtacatggaacgccgactagctgctttagaggaacggctggcccagtgccaggaccagagtagtcggcatgctgctgagctgcgggacttcaagaacaagatgctgccactgctggaggtggcagagaaggagcgggaggcactcagaactgaggccgacaccatctccgggagagtggatcgtctggagcgggaggtagactatctggagacccagaacccagctctgccctgtgtagagtttgatgagaaggtgactggaggccctgggaccaaaggcaagggaagaaggaatgagaagtacgatatggtgacaggtaaataatctgaaagcaggcccctaactcttctcagaaccgatattcttccttccttgcttcttactctttttttcgctttgtcccagtccattgtggctctgtcttctggaatctgttttagggaaacctctgtaatgccaggtctattaaggagaggttctggggatccaggccgctgtggtacccgctctttctcaattctccctaagattggaggcaaccactgggcaaatgctcactattctccagatcacccaccctgggggagttcctgctggaggcatctaattcttgcctctatttccttttcctgtgcttttctcatcagactgtggctacacaatctctcaagtgagatcaatgaagattctgaagcgatttggtggcccagctggtctatggaccaaggatccactggggcaaacagagaagatctacgtgttagatgggacacagaatgacacagcctttgtcttcccaaggctgcgtgacttcacccttgccatggctgcccggaaagcttcccgagtccgggtgcccttcccctgggtaggcacagggcagctggtatatggtggctttctttattttgctcggaggcctcctggaagacctggtggaggtggtgagatggagaacactttgcagctaatcaaattccacctggcaaaccgaacagtggtggacagctcagtattcccagcagaggggctgatccccccctacggcttgacagcagacacctacatcgacctggcagctgatgaggaaggtctttgggctgtctatgccacccgggaggatgacaggcacttgtgtctggccaagttagatccacagacactggacacagagcagcagtgggacacaccatgtcccagagagaatgctgaggctgcctttgtcatctgtgggaccctctatgtcgtctataacacccgtcctgccagtcgggcccgcatccagtgctcctttgatgccagcggcaccctgacccctgaacgggcagcactcccttattttccccgcagatatggtgcccatgccagcctccgctataacccccgagaacgccagctctatgcctgggatgatggctaccagattgtctataagctggagatgaggaagaaagaggaggaggtttgaggagctagccttgttttttgcatctttctcactcccatacatttatattatatccccactaaatttcttgttcctcattcttcaaatgtgggccagttgtggctcaaatcctctatatttttagccaatggcaatcaaattctttcagctcctttgtttcatacggaactccagatcctgagtaatccttttagagcccgaagagtcaaaaccctcaatgttccctcctgctctcctgccccatgtcaacaaatttcaggctaaggatgccccagacccagggctctaaccttgtatgcgggcaggcccagggagcaggcagcagtgttcttcccctcagagtgacttggggagggagaaataggaggagacgtccagctctgtcctctcttcctcactcctcccttcagtgtcctgaggaacaggactttctccacattgttttgtattgcaacattttgcattaaaaggaaaatccactgctc

SEQ ID NO: 8036 - DNA, 456 bp, Homo sapiens
aatcggacacgatcagcagggagaacacatgtgtttttatgagaattacgctgagataggtaacagatgaggatgaaatttgggcttgactgaagtaatgggggctgtctgtgaagccttgcggcagtacagcccaggtgattcctacttcagccccttggtgtgagcagcttctcaacatgaactacagcctccacttggccttcgtgtgtctgagtctcttcactgagaggatgtgcatccaggggagtcagttcaacgtcgaggtcggcagaagtgacaagctttccctgcctggctttgagaacctcacagcaggatataacaaatttctcaggcccaattttggtggagaacccgtacagatagcgctgactctggacattgcaagtatctctagcatttcagagagtaacatggactacacagccaccatatacctccgacagcgctgga

SEQ ID NO: 8037 - DNA, 561 bp, Homo sapiens
aaacctcgcccagattcaggcgtgtaaaccagccggagcggcgcggcagcggcaggaccgccgtggcgcctagagtagcgacccggggggagcgcggggcgacgctggctgcagggacccggtgacagcgtgagagaccagacacggtggctcacgtctgtaatcccagcactttgggaggccaaggcaggcagagcactttgggaggccagggcgggcggatcacttgaggccagaagttcgagaccagtctggccaacatggtgaaaccccatctttactaaaaatatgaaaattagccaggcatggtggtgtgttcctgtagtcccagctactcgggaggctgagcaggagaatcgctggaacctggcaggcagaacttgcagtgagctgagatcgtgccactgcactccagcctaggcgacagagtgagactccgtctcaaacaacaacaacaacaaaagctcctcgatggaaccatttgatagtgacaaggattgaagtactaggttttgacaagcttgcatcatgcgtgagtataagctagtcgttcttggctca

SEQ ID NO: 8038 - DNA, 5051 bp, Homo sapiens
acctttggtagaactattatgatggattcaatacaatccatctatggtgcaaatcaatgataaagaactctcatgcgtctaccatgtatgactgtagaattgctggtgtaagcagaactatagcagagcaaatttcaacatgcccttggccacctgggttgtaggggacactttactttttgcattgtgctgtgaccatttcatgcataatcttggatcttcatactatttgacaaccaaaagaaagaaaagggaatggatatatatatacacacatatattatatctacatatacatacatatgtatatgcctacagtacattagcaatgctggaaatagctgatgccacaaaatgcagcctgcatgcatgcagaagtttatagctggcccttcatctgcatcgattggtgttgaaggtccttggtatgtttcgacagccccatccttgatgcttctacactgttgggtgcaacatcctgtcctgcagcagcaggaaaaatggtatgagaagcttcattatgcttggagcacattttcgtgccatttgccaatgctgtaaaattgtgtaaaaatgtcagctgagaactggaaataaaacagggacatattaatatacacgccagactgtggattgtagtatgttgaattagcctaagatgtctaaattgaaagaacagcaacaaaatgcctttgtgtatctgatttcattattctcccaacaacattgctgaaatgggattagtatcattttatagaagagacttaagcatagagtaatgagttgctttgctcagggtcacacagccagtaaatggatctctggggctagcacccgtgtcatcagtcctctgacagtctcaatccattgtgctgcctctctcaggttagcaggcattaatttcaggttgaagaatcaagctacaaatccgaagttcttaactttgggaactattgaaataagtcaactctatattggtttcttattgtattttctctcaagttctctaattctcttgcccatttaaaatacaataaaaggtgtcatcaggattcagaaatatgttctgaagtaaacttaggctcttacctagttcttttgaattactgctttataattcttacctggtatttttaatttggaaaaaaaaagttagacaccctaatttgaacgaaaatgttagaaatttggttgcacaaaaataggcaagacatttccttatctgatttctggatgattactaagtaactgaaaccacgggggtgcgtgtgtgtgtgtgtgtgtaggccaacaaaaagggcttctttcaattactgctctgcatgaatttttgatagttttacttatttcctaaaagctggtaacatttatagaatagtatttaacatgaagattttaaagttagttgctactttggcatttaagtttacattaacttactgttatgttgaccagataaggactatcacctcacagctgaatttcacttttctttaaaaatttaatattaaaatgttttcatctcttaattgttggcttgcttgcatggatcattcattaaataattttttatttgctagatacccataatatctgccgaacatctgactagccacaagtatgttacccagatgtagaattttcatcactaaacaatcatgctaaagaggaaaggacagtgtgcttggttagagtaaaggacgaggtcattagccatattgtatatatcgtcaagcaacacacacaaaagttcctcagccacaagacatccacatattgcatgttaaccagaagaaaagacaacattttccggaaatccactgcacactgttgcctatacactttgtacatttaattgatatttgtgctgaggtgatattcctgtctaaaagaacaacattgtctttcttttctagcacagagttatgcattcaaagatgcatacctagttagtttcctatatattcatgccatcttgaaaagacagactatggtgtaaccatgattctattatgtattggtacgtctgtagaccaagatataattttttaaaaataagtttatttctttcaaggtttacaaataacaaaggtgcaccttgtatttaaaattgccattatagatgagagcgtgcatgcacagtcatttttgtttaagagtaatatttttaatgtaatagattgtaagacgtggtgagggagggatctgacagagatgaatgtgccaagcaaaaccacaactgtgtatattttaaagcacatcatggctttaagtaccatgttgttaaggattctcatgaagtgccatagactgtacatcaaattagagtattatttcttcagtgttattgttttcagagccacattttgttgcatatttgctagtactaatcagtcaaagggcaccattctttttttttttttttgaaaccaaagctgtctcagaaatggccaatttaactttacagtaacaatagacagcacaacacaaactctctcaatacagataaactcacacatactggagatatatatataatagatatatataaaattattttaatgcattgtagtgtaatatttatgcatactatactgtataacatgttattcaaaagggattgccatttctgagacacagtaacaaaaaaatgaggaaattattttgcttctatttatagcctctgtcaaaagtcaaaagactataaatgctttgcaaaaatggtttcacgtttgcttaaatgcttcatcacagtcacattcaaaatagtgactctaaacaaagaagaaagcagcactgtcatcagatgcatgataaaccaaaatatgaaaatgggaaatgtttaattaacctagtaattgggtgggttaagtacatgggtgaattttatatgtgatttttgttttgttttgttttgttcagattaactgcttatagccttagaaagccttttacaaaattaaaaaaaaaatagatgtgcattcagtttttaagaatggaatcatccaaaggaattcctttttttgaggtttggatgttgcagctagtaaaggatatttttgctctgttcagcagttctaaaaattgctgaagtaggggccaggtcactggtagttatagtatggaatgggagaagtgaaagttcagttatagaactttccatacttccaagtttactgcaagtttttatgcttgagagagatgctttctaatataagactgatgtgttgattttactgattgtactgtacatctattaaagccttagattattacattacgggttggaacccataccaatgtaatttcaatcgtgttaagaaagtaatggtgacttcacatgttattgtagttagttacattatagaatattacttatttttcttgttaaaatgtagtttttcatttcctacatttattagattttcattttctattaacaattgaataccatttcagtttatagacttgttttattagattttaccaatgaatttttcaaaatacaaaaaaaagtagtttttccttcataacatactcagttttgaattacatgtagtgtcacatgaatattcgtattgttaactaaatgatttatattttactgatttaatattacagtgtaagaatgtcagtcattgttagttcttgtctagttttcattaaaagaacaaagatcttttatatggatatcttataaatatataatcattgctaagtaagaagttaagttgttgctatcgcaacaatcctggcagacaattgagtaatattttgatgatttattttgtttgtaattagttattataagaagatctagatcctagatattagaataaaatttattttctactgtatccatttcaaatgttaaaatattgtttaatatttttgaaatccctgagtatcaggccttgttataaataagctgcataatcaataaatagaacaagggactttttgttgataatccaaatactcaaagtttacgtaatgaaaattatagcgtgtgtgcaaactcttgagggttgattatgctgcaatttagcatgttggaacgtctagggagaaggttgactttttgcacttctgtatatagtcaaaagagagaaacctgtataatagtaagatcttattttgaataaaaacgtctataattacaaggagttttgttaaggctaatacaatgacagactgagcaaaattgcttgcaaaagtggcacagagttagcactccataccccttcaaacatgttgctttgctttcttgtggacagcttgtagtttgccaggattttttcagctggaaagatacgccatcctttcaaaccctcatgactgacaaaaactccatggggccaaatctgcctgaagatcattaccaaaaatagcaggtacttctaccattaaggtgaaatcatggatcagatattccttacatttttcaaaactactgcatgtttaaaacttcaacaaaaaaagagagaaagaactatactaagaacatatattattcagatcagtttctgccaatttcagtggtttattgttcacaaaaaaatcttcaaaacaagtattgactttcacaaaatttaaatcataaacaggcaaaccaaacagcacactgtagctatagttgttatgtgattgttttttaattgctgtaggatcctgttctttcagcaggtgaaaaataaaacgcagttcaaatttcatggttttaattttcaactcagaagcactcaaaaatgcaaaatgtgataatgggcacttgtttaaaagaattagtgtatccagccttcactccagctggttaaaaatgttgcacttatcagcaaccctaccactttcatctgctgaaaggacaaatgtgcttggttttactattatgtaatcacaacttactttctgcttgtagttgcttaaaattatgtattttgtcttgggctgcaatttgttttatgcttattttattattactgcagtagttgactttgctgtatggaaaaataaagtgaaattgccctaataaaacttctctttcttaagta

SEQ ID NO: 8039 - DNA, 764 bp, Homo sapiens
agtgacattccatgagacaagcagtcctgtggtgaggcccatgtcaagaaggcctgagatctcccaccatcagctacagccaatttgtcagtcacagatcctcaaaatgagcagcagatacactcagtctgtaggatcatttagcaactcggggaaggaggtcataggttagcttttcaagacacttcctgcatctctgacctgttgcacctctgttatcttggcacctctgttatcttagcagcaagcacctgcctcagctgacccttgagccataacccatagggcttattccaaagggccagtgtgcaaaatatgaatccaagatggcattgtggaaagacgctgtacctcctgtgataaaattactttggtggtgcttttttctcatgtatctcgggaaactaaaaatctgaattgtattcagtggccttttccaaatgaagctcctgaaaagtacatcaagtctaaagtgaaccagctaactcattaagactggaatcatgagcaacaatggagcagacctaacctttggttacatctcctgttttgtagctatccttttgtttggctcaaattttgtgccacttaaaaaatttgatactggtgatggaatgtttctccagtgggttctttgtgctgccatatggttggttgccttggttgtcaatctgatattacattgtccaaagttttggccttttgcaatgcttgggggctgcatttgggcaacagggaacattgctgttgtcccaattatcaaa

SEQ ID NO: 8040 - DNA, 1041 bp, Homo sapiens
tttaccttttaaacatccggctgcctgtgaatgagaagaagaaaatcaatgtgggaattggggagataaaggatatccggttggtggggatccaccaaaatggaggcttcaccaaggtgtggtttgccatgaagaccttccttacgcccagcatcttcatcattatggtgtggtattggaggaggatcaccatgatgtcccgacccccagtgcttctggaaaaagtcatctttgcccttgggatttccatgacctttatcaatatcccagtggaatggttttccatcgggtttgactggacctggatgctgctgtttggtgacatccgacagggcatcttctatgcgatgcttctgtccttctggatcatcttctgtggcgagcacatgatggatcagcacgagcggaaccacatcgcagggtattggaagcaagtcggacccattgccgttggctccttctgcctcttcatatttgacatgtgtgagagaggggtacaactcacgaatcccttctacagtatctggactacagacattggaacagagctggccatggccttcatcatcgtggctggaatctgcctctgcctctacttcctgtttctatgcttcatggtatttcaggtgtttcggaacatcagtgggaagcagtccagcctgccagctatgagcaaagtccggcggctacactatgaggggctaatttttaggttcaagttcctcatgcttatcaccttggcctgcgctgccatgactgtcatcttcttcatcgttagtcagtttatggaccccttgaattctatccaaggacacccaagaggaccccaagtttggagcctctagagccctgttgttggctctgccactggggagtgttagtgttgctagctctgctgaggttgaaatgaacgtggaaaaaataaactgatacacatatatgtctttgtaagttctgttcaccacatctgctttgacctacaacactgctgtgtttatatcaggttgtttataaaaccttggaaacttcgctttccactcc

SEQ ID NO: 8041 - DNA, 2268 bp, Homo sapiens
ctcttaactcttgaagtaaataaataatctttgctggcaggactatgctgaatctccttaggcactctctaattagatgtcctaggtcctcccaattcttagtccttttatacctgtttttctccttctcttattccatttagtttttcaattcatacaaaactgtatccaggccatcacctatcattctatacaacaaatgtttcttctaacatccccacaatatcaccccttaccacaagacctcccttcagcttaatctctcccactctaggttcccacgctgcccctaatcccgcttgaagcagccctgagaaacatcgcccattctctctccataccaccccccaaaaattttcgccaccccaacacttcaacactattttatttttcttattaatataagaaggcaggcatgtcaggcctctgagcccaagccaagccatcgcaacccctgtgacttgcacctatacgcccagatggcctgaagtaactgaagaatcacaaaagaagtgaatatgccctgccccaccttaactgatgacattccaccacaaaagaagtgtaaatggctggtccttgccttaactgatgacattaccttgtgaaagtcctcttcctggctcatcctggctcaaaaagcacccccactgagcaccttgagacccccactcctgcccgccagagaacaaaccccctttgactgtaattttcctttacctacccaaatcctataaaacggccccacccttatctcccttcactgactctcttttcggactcagcccgcctgcacccaggtgaaataaacagctttattgctcacacaaagcctgtttggtggtctcttcacacggacgcacatgaaatttagttgtatccataaggcatatggaggagactaattcctcttccaaagacatgtaccagagtcctggagaggctgagggctggaggtggaagaaaggctctgacaggggtcagaatctgttcaggaaacatagcaaatgcctgatacttttaattagagaaaggtttgaatctccacattcatatatttgcagtccagtgacctttcagtttttttatgcccaaagtgtcaagcatgttaatgttaccattgactgcctccctgaaggtgcagctaccaggggaactgccaggacttcaaagcccacaaccaaaagccagaaaacactaccaagtacaagccccggacactggacccagagcacaccctgggcatctgctctgagatcctctccctggacagagacagctgctccttcagaaacagaggagaccctgaacacaggcaggcctcctgagcttccagccagggccacagccacatggttcagtgcctcccacactctcccagccttggctaccaggagggtggccagaactcagtggttgacagctgacagacagacgtgggcttccatatcgtccgtgccctgggctcagaccatcagtgagaaaaaacctggagggtctctctgggaaactcgttcttccccaccgactactgcagggaccgaggaagccatgaacactacaagccttttggcgcctgctgctgagataatggccacacctggcagcccatcccaggccagccctaccttgggagcattcacccatggcacacagactccgagtccaaccaaggcaacagcccccagatatccacaaacaggtgatctctctgcagagtggccattcactgctggtgaagagccagtcctggtcccaagaccccatcaagtttcaaggtgtcctcagccactcttcaaggtgggagctatggcagctgctcctctcaccctggctattcagaggctcaacccatgcctgatggagctgtgccaattcttccagcaatgcctctgcatgagccagaggagtcccaggacagaggacatgagatactgtcttgaatactattcctggtttctgaagaatgcaacatatatctgtcagagggtgaaaagggtgtcccactcgcacaccttaaagcaaaagtgccttgagaatatctgcaagtctgtgtgaggccttgaaaataacactagggcataacaattacttcaggggatacgccatccaccctggctcttgtcccaagtgggctacatttgaagaattcacccaggctccagctagatcatcagttaatttaaagtggttattcttggaagtagcattttttttccctctcctgtgaatctgtgcaaaacattgaaggtagaagttttcttgtta

SEQ ID NO: 8042 - DNA, 285 bp, Homo sapiens
cttggagccaaacagtcctaaggctcccggaagctctcagataagccatgccacctctcctgacctctgtgtcctcatggggaaagtggggctaacaggaaaatgccctttgctgcatgtccaggggattaaggaaatgggatccctccaagcagatgcaggaaaaggcaaaggagatctacatgacctttctgtccagcaaggcctcatcacaggtcaacgtggaggggcagtctcggctcaacgagaagatcctggaagaaccgcaccctctgatgttccaga

SEQ ID NO: 8043 - DNA, 3084 bp, Homo sapiens
aatagccctgccgcagcccatccagctggctcagagccgttccccatgcccgggtgtctccatcaccccagaaaacatgcaaaacagctcggcgcctctgtgttcctgactgtgaaatggggatagggctctgtgtcccaccagcgaggtgctggaagaggctcacgaggagctccagagggcagcctctagagcggcccgcggccactattattatcggcctttctattgtggagaggagtaaacagactcagagaggtcccgtggatttctcaaggtcacacagcgccccagcagcggagcaggaatgcaaacccaggatctccgccgcgagatccaccccggcgcccccgagtcccgcagttcccggcttcaggacaaccccttgccagaccttcactgcctggtgcaactcacacctgcgcaaggcaggcacccagatcgagaacatcgaggaagatttccgcaatggcctcaaactcatgctgctcctggaggtcatttcaggtgagaggctgcctaggccagataaaggcaagatgcgcttccacaaaatcgccaacgttaacaaggccctggacttcattgccagcaagggggttaaactggtgtccattggtgctgaagagattgttgacgggaacctgaagatgaccctgggcatgatctggaccatcatccttcgcttcgccatccaggacatctctgtggaagaaacctcagccaaggaaggcttgcttctgtggtgccagaggaagacagcaccgtaccgcaacgtcaacgtgcagaacttccacaccagctggaaggatggcctggccctctgtgccctcatccaccgacaccgccctgacctcatcgactacgccaaactgcgaaaggatgaccccatcggaaacctgaacactgcctttgaggtggcagagaaatacctggacatccccaagatgttggatgcagaagacattgtgaacaccccaaagccggatgagaaggccatcatgacctatgtgtcctgcttctaccatgcctttgccggggctgagcaggcagagacagctgccaacaggatctgcaaggtgctggcagtgaaccaggaaaacgagaagctgatggaggagtatgagaagcttgccagtgagctgctggagtggatccgccgcactgtcccatggctggagaaccgtgtgggtgagcccagcatgagtgccatgcagcgcaaactagaggactttcgggactaccggcgtctgcacaagccgccccgcattcaggaaaagtgccagctggagatcaacttcaacacactgcagaccaagttgcggctcagccaccggcctgccttcatgccctccgagggcaagctggtctcggacatcgccaacgcctggcgggggctggagcaggtggaaaagggctatgaggactggctgctctcggagatccggcgcctgcagcgactccagcacctggctgagaagttccggcagaaggcctccctgcacgaagcctggacccggggaaaggaggagatgctgagccagcgcgactacgattcggctttgctacaggaggtgcgggcgttgctgcggcgccacgaggcctttgagagcgacctggcggcgcaccaggaccgcgtggagcacattgccgcgctggcccaggagctcaatgagctggactaccacgaggcagcctcagtgaatagccgctgccaggccatctgcgatcagtgggacaacctgggcaccctgacccagaagaggcgggatgcgctagagcggatggagaagctcctggagaccattgaccggctgcaactggagtttgcccggcgggccgcgcccttcaacaactggctggatggtgccgtggaggacctgcaggacgtgtggctggtacactctgtggaggagacccagagcctgctgacagcgcacgatcagttcaaggcaacactgcccgaggctgactgagagcgaggtgccatcatgggcatccagggtgagatccagaagatctgccagacgtatgggctgcggccctgctccaccaatccctacatcaccctcagcccgcaggacatcaacaccaagtgggatatggtccgaaagctggtgcccagctgtgaccagacactgcaggaggagctggcacggcagcaggtaaacgagaggctccggcgacagtttgcggcccaggccaatgccattggaccctggatccaggcgaaggtggaggaagtggggcggctggcagcagggctagctggctctctggaggagcagatggctgggctacggcagcaggagcagaacattatcaactacaagactaacattgaccggctggagggtgaccaccagctgctgcaggagagcctggtgttcgacaataagcacaccgtctacagcatggagcacatccgcgtgggctgggagcagctgctcacctccattgcccgcaccatcaatgaagtggagaaccaggtactgacccgagacgccaagggactgagccaggagcagctcaacgagttccgagcatccttcaaccactttgacaggaagcagaatgggatgatggagcctgatgacttccgagcttgcctcatctccatgggctatgacctgggggaagtggagtttgctcgcatcatgaccatggtggaccccaacgcagctggggtggtgaccttccaggccttcatagacttcatgacccgagagacagccgagactgacacgactgagcaagttgtagcttccttcaagatcttggcaggagacaagaactacatcacccccgaggagctgcggcgcgagctccctgccaagcaggccgagtactgcatccgccgtatggtgccctacaagggatccggggccccggctggagccctggactacgtggccttctccagtgccctctatggggagagcgacctttgaccccaaccactgaggttctctatgcaagatggagagaggatgcaccctgtggctgatcccatccgtccctcggagcaagggcctaagagaaaagccagccaagtgcttctgaataaagatccctctctgggtc

SEQ ID NO: 8044 - DNA, 2577 bp, Homo sapiens
gccagagtgagactccgtctcgaaaaaaaacaaaaacccagaaagactgaatatttggatggaagttttaccagaagcacaaatgccgttcacaggcacatgtatgcaacgaggaaagctaatttacaggcatcccattgaactgtgggaaatgctaggaaacttttaagaagcaaggaattataaggtaccgccaggcaggccctgtcatcgcggtgcaagtggagaatgagtatggctcattcaataaggataaaacatacatgccgtatctccacaaggccctgctgagaagagggattgtggagcttctcttgacctctgatggtgagaaacatgtgctgagtggccacaccaaaggaggtacacatttagagttagttcacaggagaacagggctctcagccagcccgtgtaaatcttgaacacactgcagagaaaaccaagtgcatctcgatacctccctttcccgtgtccactgggatggatcctggagttcgatgttacaataaatgaggactcaaggttaaggctcagggccactcacagctccctatcttggccttgctcctgccgtctttaaacacagcagcactggagctcctctgttctcaggacgcctttccatctcccatagtttttctgtggcaagaaatctgcattggtgctgcgcctggcttgggatcagggccatctccactaacttgggaaaccacagggagaaccagaagatgggtgttgtgtcaggaaccccgcctagatccggttccattcctgggatcctaccgcccaaggctctgtgtggacacttaggagatcctagagaattaagtggcaggaagattctggacggactcatcagatggcaatagtgagggacacgcccgggagtgagcaggggagcggggcgagctgctgccggcggctgccgttctgcctccttagtagtggctcttccaaggaagcctggcacactggaacacgtgctgagcttggggccaggaagcctgtgtcccgtttccagtctaatcatgtcagggagccttggcctggctcacttctctgcacagagtgtggttaatttcaacagtgggtgtcctcgcaagtgtcagggatgtggcgatggccgtggcagccctttggatgtggcagagtggggtccagacagcatctcgccatcctcactgctgagcatgggttcctcctgcgtgcgtccgggccgggggcgcattccttcccttccctgacagcacttgtctcatgcctcagctgggtctctctcttctttatgcagtgttggccgccatcaatttgcaaaaacttcaccaggatactttcaatcagcttcataaagtccagccagtcaggtcgcgtcagcccgtcaacatggagaaccttcccataaacaatgggagcggccagtcctacgggcttgtcctgtatgagaagtccatctgctccggaggccgcctccgtgcccacgctcatgacgtggcacaggtgtttttggatgagacaatgatagggattctgaatgagaataataaggacctgcacattcctgaactcagggaataactggatctgtcagcatcaataactcttccctggagggctttaccatctattccctggagatgaaaatgagcttctttgagaggctccgctctgccacctggaagcctgtcccagacagccaccagggcccggccttctactgtgggaccttgaaggctggcccttctcccaaggacaccttcctgagcctgctgaactggaattatggatttgtgttcatcaatggacgtaaccttgggcgatattggaatattgggcctcagaaaacactgtaccttcctggagtttggcttcatccagaagacaatgaggtcatcttgtttgagaagatgatgagtggctcagatatcaaatctacagacaagcccacgctgtaaaactgtgtctgaacatttttttttttttttgagatggagtctcactttgtcgcccaggctggagtgcagtggcacaatctctgctcactgcaagctcagcctctcgggttcacgccattctcctgcctcagcctccccagcagctgggactacaggtgcacgccaccacgcctggctaattttttgtatttttagtagagatggggtttcaccaagttagccaggatggtcccaatctcctgaccttgtgatctgctctcctcagcctcccaaagtactgggattacaggcgtgagccaccactcccggccgtgaacatattttttgggttgctggagttcatctataagtcatttttgaggaataagatttatgttaagactatcaaacacagtgttgcctacaatagcaaaaatgtgaaaataacaacaacaacaaaacagcagaggaattgttatgtattttgtagtctatctatatgatgcctatttttaggctttaaaaagtcttcaaaatctttaatgactgatttatctagttaaatgcttaatccttagcaggctcttattctttaattaaacgtgcctttgagtagatgtgaataaaataaaaacaagtttca

SEQ ID NO: 8045 - DNA, 619 bp, Homo sapiens
cctgccactttcacagtgtacgaataccacagaccagataaacagtgtaccatgttttatagcacttccaatatcaaaattcagaaagtctgtgaaggagccgcgtgcaagtgtgtagaagctgattgtgggcaaatgcaggaagaattggatctgacaatctctgcagagacaagaaaacaaacagcatgtaaaccagagattgcatatgcttataaagttagcatcacatccatcactgtagaaaatgtttttgtcaagtacaaggcaacccttctggatatctacaaaactggtgagaattcattcgttcattcgttccttcattcagcaactatttagtactgactatgtgccaggcattatattaaacacagaagatacaactcaaataagacagagctcttgcctttttaaagcttatattctacttggggagaaacattttttaaagatgttcgtataaatatttctcattgaattcatttttctaaaacttcagcaaaatgtttttttcaattgcgtaattgtccaatttctttttctttacaacttttattttaggttcaggggatacgtgtgcaaatttgctacatgggtaaattgcatgttttggggg

SEQ ID NO: 8046 - DNA, 2990 bp, Homo sapiens
atccgaatctggtgttacgccgtataaagaaagaaactgtgacaaaaaatactgtgaaaataactcttgtgcacaatcttctttggcctcttctcaggaacctgaaccaaagaaatatggtggaaaaatcagaggaagatctaaaaggaaatcctttgaatttgaggatattcagcactttcgaaatcggaactcacagacgattcgtgaagaacttggaagaaattctggatcccaccaaagaaaatccatatgaagatattccagtgcagcctttacctatgtggagatccccttcagcatggaagctaccacccgctaaaagtgcttttaaagcacccaagctccctccaaaacctcagttccttcaccggaagactatggaagtaaagaactcacaggcttatttgcggtcaaagcttacaaaagatacaactttgccggtcactttaacggaatggaagcttttccgagctggtgaagttgcaaacacgaaaaggaaaaatcttccaaggcttgtattgaaaatagatgacatatttgaatctaaaagagggaagaagaaggtaaagttacattcttacactggaaaggaattacctccgacaaaaggtgaaaccagtgggaacgaaagtgatgccgagtatctgccaaagaatcgccataaacgcttagcacaactgcaaccgtcttccaagaggaatcctcactaccagaccttggagcgggatcttattgaattacaggagcagcagctgtttgaactttttgtggtggtgtctctacagaagaaaccatcaggaataagctatattccccaggtcatacaacaattccctggcaaggatgatcatggctataagcagtccaaagacatggaagagagacttaaagttattccaaaattttgttttcctgattcaaaggactggatgccaacctcagaactcaagagtgaaacattctcctttgtcttgactggtgaagatggaagccggtggtttggttactgtaagaagctcttgccagtaggcaaaggaaagcgactccctgaggtatactgcatggttagtcgcctaggctgcttcaatcttttttcaaagattctggatgaagtagagaagagaagagaaatgtctccagcccttgtttacccattcatgcgaagtgtcatggaagctcctttcccagctcctggacgcaccatcacagttaagagttacctccctggggctggagatgagtccattgaactctgccgaccactagattcccgattggaacatgttgattttaaatgtctctttaagtgcctgagtgtgtgtcatctcatccgggtctgtgcctctctccttttggagcgtagggtaatctttgttgccaacagcctaagcaccctgtcaaaatgtggccatgctgtggtagctacactgtatccgttcacctggcagcatacctatatcccagtcctgccagcatctatgattgacatcgtgtgctcacctacaccattccttattggaatcctgtcttgctccttaccacagctccaggacctacccattgaagaggtgctgatagttgatctctgtgcagacaagttcttacaggagtttatagctgcctatcccaaaggaggaaggaggaaacataaatgtctcattctcaaaagaggtaaaaccacccttcaactccaggtgggtcgacacataagcctctaatttaattacattttaaaagcatttattaagcactgattatttctttttttttttttttttgagatggagtctcgctctgtcgcccaggctggagtgcagtggcgcaatctcggctcactgcaagctccgccgcctcctgggttcacgccattctcctgcctcagcctcccgagtagctgggactacaggtatctgatgaggatgaaattctaccaccaaaacttcaagctgccctgatgcagattttggaagaacgaaatgaaatcttgactcaggagcagaatttttcacaagatgtgacactcaactctctggtgtccgaagcatttgtcaggttttttgtggagttggtaggacattattctttgaacatgactgtcactgagcgtggggagcgtgttttccaaagggaaccattccgtaagtcccacacctcccgaagtgtacgccacttcctggatctcttcatggaaactcagatgtttgcaggattcatccaggaccgagagcttcggaaaagtggagttaaaggtttgtttgagatccgggccatccagtatttggaaacaattcctgagtcggagcccagtgggatgaatagaattttgcggagtcttggttagttgctgtgttttcctgttagataaatgtggctgaagaccaggcgcggtggctcatgcctgtaattccagcactttgcgaggtcaagtaaggaggtttgcttgaggccaggagtttgagaccagcgtgggcaacatagtgagaccccatccctacacaaaattttaaaattagctgggcatggttgggcatggtggcttatgcctgtaatcccagcactttgggaggctgaggcaggttgatcacctgaggttaggagttcgagactagctagcctgtccaacatggtgaaaccccatctctgctaaaaatacaaaaattagcctggtttagtggcaggcacctgtaatcccagctacttgggaggctgaggcagaagaattgcttgaacccaggatatggaggttacggtgagcagagatcacaccattgcactccagcctgggcaacaagagcaaaattctgtctcaaaaaaaaaaaaaaaattagctaggcatgctggcacattcctgtagttctagctacgcaggaggctgagaggcccgagggggatcgctggagcccgggagtttgaggcctcagtaagatgatcttgccacagatgacagagtgagattcttgtctctaaaaaaataaataaataaaaat

SEQ ID NO: 8047 - DNA, 476 bp, Homo sapiens
atgaggggagattgccttccactacacataagtatggtcaagtatgaaatagtgttttatccacaacctgcacaactccaggctggtggaacacttggcatgctttcagcctcaatctttctactgaaagtactagacaaggtttctcattaaccttgtgaagcaaaagccacaaataacagaggaacaacttgaggctgtcattgcagatttctcaggcctgttggagaaatgctgccaaggccaggaacaggaagtctgctttgctgaagagggacaaaaactgatttcaaaaactcgtgctgctttgggagtttaaattacttcaggggaagagaagacaaaacgagtctttcattcggtgtgaacttttctctttaattttaactgatttaacactttttgtgaattaatgaaatgataaagacttttatgtgagatttccttatcacagaaataaaatatctccaaatgtt

SEQ ID NO: 8048 - DNA, 903 bp, Homo sapiens
agagcaacagatccagggagcattcacctgccctgtctccaaacagagggagcagctatttaaggggagcaggagtgcagaacaaacaagacggcctggggatacaactctggagtcctctgagagagccaccaaggaggagcaggggagcgacggccggggcagaagttgagaccacccagcagaggagctaggccagtccatctgcatttgtcacccaagaactcttaccatgaagaccctcctactgttggcagtgatcatgatctttggcctactgcaggcccatgggaatttggtgaatttccacagaatgatcaagttgacgacaggaaaggaagccgcactcagttatggcttctacggctgccactgtggcgtgggtggcagaggatcccccaaggatgcaacggatcgctgctgtgtcactcatgactgttgctacaaacgtctggagaaacgtggatgtggcaccaaatttctgagctacaagtttagcaactcggggagcagaatcacctgtgcaaaacaggactcctgcagaagtcaactgtgtgagtgtgataaggctgctgccacctgttttgctagaaacaagacgacctacaataaaaagtaccagtactattccaataaacactgcagagggagcacccctcgttgctgagtcccctcttccctggaaaccttccacccagtgctgaatttccctctctcataccctccctccctaccctaaccaagttccttggccatgcagaaagcatccctcacccatcctagaggccaggcaggagcccttctatacccacccagaatgagacatccagcagatttccagccttctactgctctcctccacctcaactccgtgcttaaccaaagaagctgtactccgggggg

SEQ ID NO: 8049 - DNA, 725 bp, Homo sapiens
cgctgccccatacctgaagaccaagtttatctgtgtgacaccgtaagtggcttcctttccccgttttgccttcatttctaatatcctcagttatccctgggaatgggacactgggtgagagttaatctgccaaaggttggaagcccctgggctatgtttagtactcaaagtgaccttgtgtgtttaaaaagcttgagcttttatttttctgttggagaccagagtttgatggcttgtgtgtgtgtgttttgttcttttttttttttccattgtgtcttgtcaaccccccgtttcccctcctgctgccccccatttcctacagaacgacctgcagcaataccattgacctgccgatgtccccccgcactttagattcattgatgcagtttggaaataatggtgaaggtgctgaaccctcagcaggagggcagtttgagtccctcacctttgacatggagttgacctcggagtgcgctacctcccccatgtgaggagctgagaacggaagctgcagaaagatacgactgaggcgcctacctgcattctgccacccctcacacagccaaaccccagatcatctgaaactactaactttgtggttccagattttttttaatctcctacttctgctatctttgagcaatctgggcacttttaaaaatagagaaatgagtgaatgtgggtgatctgcttttatctaaatgcaaataaggatgtgttctctg

SEQ ID NO: 8050 - DNA, 849 bp, Homo sapiens
gacaatgtgcaaatgacaccgttttgtgctcaccagggcaaagcaagggagcgccctcacttcagcatctcagccctgctaaagaaaaagctgctggccagcacaggccagccagaagatgacactgagactacaggtttggaaggcggcgttgccatgccaggtgccgaagatgatgtggtgactccaggaaccagcgaagaccgctataagtctggcttgacaactctggtggcaacaagtgtcaacagtgtaacaggcattcgcatcgaggatctgccaacttcagaaagcacagtccacgcgcaagaacaaagtccaagcgccacagcctcaaacgtggccaccagtcactccacggagaaagtggatggagacacacagacaacagttgagaaagatggtttgtcaacagtgaccctggttggaatcatagttggggtcttactagccatcggcttcattggtgcaatcatcgttgtggttatgcgaaaaatgtcgggaaggccctaaagagctgaagggttacgccctgctgccaacgtgcttaaaaaaagaccgtttctgactctgtgccctgtccctgagctcgtgggagaagatgacccgtggaacacttgcctggcccactcagaatccacggtgacctctccgcttgccaaaataaccgaaggaaagaccgttcaccagacttggctcctctaaacatttgctgttcaaacatgtttttgaatatacattctataaaagattatttgaaagacaaaattcatagaaaatggagcaaaactgtataaactgatttgtaactaacactggaccattggatcgatattatatgctgtaacc

SEQ ID NO: 8051 - DNA, 615 bp, Homo sapiens
ggggactccgcctcggccgccctggacgagctgtcactgaatttcacgtacggggcaccaggcgccggcaacggctccctctcgggcgactggtaccgcaggaaccagattcacctttttggagttttgctggctattttaggaaacttggtgatcagtatttctctaaatattcagaaatattctcaccttcagctggcacaacaagagcacccaaggccatacttcaagagtgtgctgtggtggggtggtgtcctgctgatggccgtgggagagacggggaactttgcagcctatggatttgctcccattactctgatcgctccgttaggctgtgtgtctgttacaggtaagccattctgtattttgacaaatagaaacttaaagagcagaataatcggagaaaaacacacaactgaaacaacaaatgcaccaaagaagaaagtctattgcctggtttcttatcacgttaacatggaacaattattctgctaatttcagcgatccattgtcatgctgtcacattaaccatgaagaaacttgcattttgtgactctaacacctatgtgtgaaagcctgatgcctgagtcttaataaattaacggtgacagaaga

SEQ ID NO: 8052 - DNA, 474 bp, Homo sapiens
atcgagcctgcgtgctgccgaagcagggcgccgagtccatgcgaactgccatctgatccgctcttatcaatgaagcagccgatcatggcggatggcccccggtgcaagaggcgcaaacaagccaatcccaggaggaaaaacgcaaagacaaaccacctaaatagagagattaattccacatcagtgcaacattaaaagggagagaggatgccaagaatcccattaatttgggatataagtgtctgaaatttcctcaaaacatttacgccaaggaataccaacaagacaatatcaagcagctctccctaaggatagagaggcatgttaaaactgtataaccaacagaaccatttaaaaggaagaaaaacatcacccaagttccgtgtctgaatgaaggctgtcttctcaaatgctcctcattactccagagcagttatatttggattataattaaaacgaggcttcttttttttc

SEQ ID NO: 8053 - DNA, 622 bp, Homo sapiens
agtgctgggctataattaatgtttttattaaatttggagggaagtttttgcagcctttcgcctagcgtggccttcaggttgatagaagtccagatcctgaggaaatctccagctaaatgctcaaaatataaaatactgagctgagatttgcgaagagcagcagcatggatggattttatgaccagcaagtgccttacatggtcaccaatagtcagcgtgggagaaattgtaacgagaaaccaacaaatgtcaggaaaagaaaattcattaacagagatctggctcatgattcagaagaactctttcaagatctaagtcaattacaggaaacatggcttgcagaagctcaggtacctgacaatgatgagcagtttgtaccagactatcaggctgaaagttacatgtctggatactggctactggctactgtattggtcagcacagctttgaacagcgatgtcttccacattgttgtctccagcctggttcttccctccgaagctgtccattggacatcctcacctgatccctgctagtgtccctgtgcagattagaaaaaggcaacacctctggacttgctcccttagcccttggctgtgcattgcacaaaacaccatctaca

SEQ ID NO: 8054 - DNA, 1180 bp, Homo sapiens
tcacatctgtgcctaaggctcctattgacaaggactctctgcattaggtagtaaataactagatgtatgaatgctgctaactttataaaagaaaactgtaatttcattaccagaagtacaatgatttaattattatgtcagagcttctacattcattagtttatatttacctacttgcccattagtgtatatttacaagtcacagtttcttaaattttatagggactctcgatgcagaagattaaagttcatgaaaagtcagtcttagggtgcttcttaaatttacaggtgtaaaccttctggtggggactgaaaatggcctgatgcttttggaccgaagtgggcaaggcaaagtctataatctgatcaaccggaggcgatttcagcagatggatgtgctagagggactgaatgtccttgtgacaatttcaggaaagaagaataagctacgagtttactatctttcatggttaagaaacagaatactacataatgacccagaagtagaaaagaaacaaggctggatcactgttggggacttggaaggctgtatacattataaagttgttaaatatgaaaggatcaaatttttggtgattgccttaaagaatgctgtggaaatatatgcttgggctcctaaaccgtatcataaattcatggcatttaagtcttttgcagatctccagcacaagcctctgctagttgatctcacggtagaagaaggtcaaagattaaaggttatttttggttcacacactggtttccatgtaattgatgttgattcaggaaactcttatgatatctacataccatctcatattcagggcaatatcactcctcatgctattgtcatcttgcctaaaacagatggaatggaaatgcttgtttgctatgaggatgagggggtgtatgtaaacacctatggccggataactaaggatgtggtgctccaatggggagaaatgcccacgtctgtgggtaggttaaccattccttatctccttcagcagttacaccccccaaatgaaacgaaaatcaagaaatgtgaaacaaccatttgattccacaaaaaaaaaaaaaaaaaaatctgtgaataactcttgtaagacttgctttgtccatttatctcaagtcgtttgtcatttttgtggttaagatgtgaacagatgctgtgagttat

SEQ ID NO: 8055 - DNA, 596 bp, Homo sapiens; identical to SEQ ID NO: 7257

SEQ ID NO: 8056 - DNA, 1546 bp, Homo sapiens
tattctgttagagatacattattaggaccaggacgcccctacagggccatagatttctcacatcaaggacctgcatttgttacctggcaccggtaccatttgttgtgtctggaaagagatctccagcgactcattggcaatgagtcttttgctttgccctactggaactttgccactgggaggaacgagtgtgatgtgtgtacagaccagctgtttggggcagcgagaccagacgatccgactctgattagtcggaactcaagattctccagctgggaaactgtctgtgatagcttggatgactacaaccacctggtcaccttgtgcaatggaacctatgaaggtttgctgagaagaaatcaaatgggaagaaacagcatgaaattgccaaccttaaaagacatacgagattgcctgtctctccagaagtttgacaatcctcccttcttccagaactctaccttcagtttcaggaatgctttggaagggtttgataaagcagatgggactctggattctcaagtgatgagccttcataatttggttcattccttcctgaacgggacaaacgctttgccacattcagccgccaatgatcccatttttgtgaaaagagaaagcgaccaaggaactcccttccctgcatgtgctggtaaccatgagcctgggaggctctactcagtttcttttgctggcataacagcaagaattcaagtgagagtttatgaaatgagtagacagaagagtattcctggttcttcattcctttactgatgccatctttgatgagtggatgaaaagatttaatcctcctgcagatgcctggcctcaggagctggcccctattggtcacaatcggatgtacaacatggttcctttcttccctccagtgactaatgaagaactctttttaacctcagaccaacttggctacagctatgccatcgatctgccagtttcagttgaagaaactccaggttggcccacaactctcttagtagtcatgggaacactggtggctttggttggtctttttgtgctgttggcttttcttcaatatagaagacttcgaaaaggatatacacccctaatggagacacatttaagcagcaagagatacacagaagaagcctagggtgctcatgccttacctaagagaagaggctggccaagccacagttctgacgctgacaataaaggaactaatcctcactgttccttcttgagttgaagatctttgacataggttcttctatagtgatgatgatctcattcagaagatgcttagctgtagtttccgctttgcttgcttgtttaacaaacccaactaaagtgcttgaggctacctctaccttcaaataaagatagacctgacaatttgtgatatctaataataaccccccccccaatattgattaagcctcctccttttctgaaagcatttaaaaaaaaacaaaaaaaatcccaaaacattgatccaggggagtcatttaaatttgcaggtcagtgcaatgtgagacctggccaagaccatacatcaatcttt

SEQ ID NO: 8057 - DNA, 731 bp, Homo sapiens
cagtggcttgggagctggagcaggtggtggaggcctgaaatgactacttgagcttactcacatagcatattggtatatcaaaatgaaatgcaaggaaccaaaaataacataattgaaggcagtaaaagtgaaattaaataggaagatcatcagtcaaggaagacccactggagaggacagaaaatgaagcagtgttttatcatgtgtatttcagcaggtcttcttgaaatttaactaaaaatatgactgctctctcttcagagaactgctcttttcagtaccagttacgtcaaacaaaccagcccctagatgttaactatctgctattcttgatcatacttgggaaaatattattaaatatccttacactaggaatgagaagaaaaaacacctgtcaaaattttatggaatatttttgcatttcactagcattcgttgatcttttacttttggtaaacatttccattatattgtatttcagggattttgtacttttaagcattaggttcactaaataccacatctgcctatttactcaaattatttcctttacttatggctttttgcattatccagttttcctgacagcttgtatagattattgcctgaatttctctaaaacaaccaagctttcatttaagtgtcaaaaattattttatttctttacagtaattttaatttggatttcagtccttgcttatgttttgggagacccagccatctaccaaagc

SEQ ID NO: 8058 - DNA, 851 bp, Homo sapiens
gctcctgggggctccaggcatccctgggcttgtggccgcgtcattccaggctctgtctccgtctccacgtggccttctcctctgtgtctgtgtctcctctcctgtctcttagaaggacacctgtcgaccactgcttgagataatttttatgaacagggtgagggtggccccctaactggccaggcttgggccacacccctctcttgggtgattgacaggctttggccacacacccccatcttcagtgattgacaggcttggaccacacccccctatcctcagtgattgaaaggcttggaccacacccctctcctcattgattggcagtcctggagaaccacacagcccagacagggagtgaccccaggggcgaggggtgctgggtgcacagtttccatggatgcagcagagaggtcagggccagtagcaagctggaccaaagtggaccggagggaggcggtggggctaacgtccacactgcccctgccgccttctgtccattccatcactcattcactctgcattctcagagtggcattcattcatgcattcattcatgcattcattcatttactcatttgctccacacattccatcactcattcgctctgcattctcagagtggcattcattcattcattcattcatttactcatttgctccacacattccgtcactcattggctgtgcattctcagagtggcattcattcattcactcatttactcatttgctccacacattccatcactcattcgctctgtattctcagagtggcattcattcattcattcattcatttactcatttgctccacacattccgtcactcattggctgtgcattctcaga

SEQ ID NO: 8059 - DNA, 348 bp, Homo sapiens
tttggccggaaaggcttaccatgagttgccagggctgagagagatggagaaggattcgcggcggtgacagattaaattccccagttacattatagacttggagacttgtccttgtgtggacgggagccggaaagccttgagaacttattcctcgacccggacatggcacaggagaaaatgaaactaggtttcaagtcgctgccgagttccactaccgcagacggcaacattctgagaagagtcaacagtgcccctttgatcaatggacttggctgctttgtcacctctgaccttcacctccagccgcttgaatggaaatggttgtcaagcaaataagctttggacttt

SEQ ID NO: 8060 - DNA, 1383 bp, Homo sapiens
agccctttgtttatggcctgatctagctaaggcttctagacttcaggagcttaagaatcgtccggagggctgggcgtggcggtgcaggcctgtagtcccacccactccgaaggctgcggagggaggatcaacttgagtctgggaactcagccaggaattcaagaccagcctgggcaacacagtgaggccccctacccacatcctctccgtccccgcaatctccttccatcccagggtgttgctgaaaatgtcagatgcaaatttggatagcagcaagaagaatttcttggagggggaagtagatgatgaggaaagtgtgattttgacactggtgccagttaaagatgacgcaaatatggaacaaatggaaccaagcgtttcttcaacttctgatgtcaaactggagaagcctaagaaatacaatccaggtcatctacttcaaacaaatgagcaatttacagctccacaaaaagctagatgcaaaataccagcccttcccttgccgaccattttgcctcccattaataaggtgtgtcgggacactttgcgggactggtgtcaacaactcggtttgagtactaatggcaagaaaatcgaagtttatctgaggcttcataggcatgcttaccctgaacaacggcaagatatgcctgaaatgtcacaagagaccagattacagcgatgttcgaggaaacgcaaggcagtgaccaagagagcaaggcttcagagaagttatgagatgaatgagagagcagaagagaccaatacagttgaagtgataacttcagcaccgggagccatgttggcatcatgggcaagaattgctgcaagagctgttcagcctaaggctttgaattcatgttccattcctgtttctgttgaggcctttttgatgcaagcctctggcgtcaggtggtgtgtggtccatggcagacttctctcggcagacacaaagggttgggtacgcctgcagtttcatgcaggtcaggcctgggtgcctaccactcacaggaggatgatttctctcttcttgttacctgcctgcattttcccatccccaggcatagaagataatatgttatgccccgactgtgctaagaggaataagaagatgatgaaaagattaatgacagtagagaagtagcagcaacctgtttgaatacaatgtactaaaggagggatgtactttcagatcatgtaacctattacgaaggagtggaagaggagacaatttgaatgaatcctcatgatctacaaaacaaaatcatagtgactaggactccacagtgaagatggttgactagtgacacagccccatctaaagaatccctttctgtatgtctgaaaacccattaaaataaagtcactgcaattggccttgta

SEQ ID NO: 8061 - DNA, 4735 bp, Homo sapiens
taccggcttcagcttctctacagcaatggtgaggcccgggtcgggtctatggcctcaccctggggctccgggtctgggcagggggcgcagggagctccaggtggacgaaatcctccagcgaagggataaggacggagcaggatttctacgtgcgcctcattgactccatgacaaaacaagccatagtgtatgaaggccaagacaagaacccagaaatgtgccgagtcttgctcacacatgagatcatgtgcagccgctgttgtgacaagaaaagctgtggcaaccgaaatgagactccctcagatccagtgataattgacaggttcttcttgaaatttttcctcaaatgtaaccaaaattgcctaaagaatgcgggaaacccacgtgacatgcggagattccaggtcgtggtgtctacgacagtcaatgtggatggccatgtcctggcagtctctgataacatgtttgtccataataattccaagcatgggcggagggctcggaggcttgacccctcggaaggtacgccctcttatctggaacatgctactccctgtatcaaagccatcagcccgagtgaaggatggacgacgggaggtgcgactgtgatcatcataggggacaatttctttgatgggttacaggtcatattcggtaccatgctggtctggagtgagttgatcactcctcatgccatccgtgtgcagacccctcctcggcacatccctggtgttgtggaagtcacactgtcctacaaatctaagcagttctgcaaaggaacaccaggcagattcatttatacagcgctcaacgaacccaccatcgattatggtttccagaggttacagaaggtcattcctcggcaccctggtgaccctgagcgtttgccaaaggaagtaatactcaaaagggctgcggatctggtagaagcactgtatgggatgccacacaacaaccaggaaatcattctgaagagagcggccgacattgccgaggccctgtacagtgttccccgcaaccacaaccaactcccggcccttgctaacacctcggtccacgcagggatgatgggcgtgaattcgttcagtggacaactggccgtgaatgtctccgaggcatcacaagccaccaatcagggtttcacccgcaactcaagcagcgtatcaccacacgggtacgtgccgagcaccactccccagcagaccaactataactccgtcaccacgagcatgaacggatacggctctgccgcaatgtccaatttgggcggctcccccaccttcctcaacggctcagctgccaactccccctatgccatagtgccatccagccccaccatggcctcctccacaagcctcccctccaactgcagcagctcctcgggcatcttctccttctcaccagccaacatggtctcagccgtgaaacagaagagtgctttcgcaccagtcgtcagaccccagacctccccacctcccacctgcaccagcaccaacgggaacagcctgcaagcgatatctggcatgattgttcctcctatgtgaaagaattgccttgaagaattgtattaatgaagaggttggattctgctacagagagtaatctgatacaagtcccagagtggaacttttaactcaggcctttttaagaggaatcacaataactgcagatttttaaacaaacaaaatcaccgaccttgcaaatactgaaattggaagagggatctgcaagtgcagggtgttggttaaagttgtacctcccaagtatttgggggatatatttattctgtattgacaaaagcaaatccactttttctttttcttttttttttttaagcttaattctgcaatcatttgtcttttataaaccgtaaagctctatacaagggacactataaataagactccatgttttaatttatgatgtttttaaagctgtgtaaaggaagaatgaagtggtgatatttacaaaaaagtaaaaaaaaaaaaaaagaaaaaaaggaaaaaaaaaaaagcttgtatgggacagaataggaatgccagttagattttttagaaaaactaagggtcggcttttgcgccttaaagcatatcaaatggtagttagctcagacagtgcattttcaatatctaacttaacatgccaccccttagcagtgcaagcttatttatctcttttgtattgttgtcttaagcaactgtgtaaataaatgcagcctggaaagttaaaacgcgatgtaagtgatcacatttttccctctactcgaaaatccagtgcctctagacagattgttaaaactgcatatttaaatctgatctcattctctccttttacttaagtcagtttcttctgaagccgatggcctctcgagagcttggtggcacacatactgtgtgagaatctcctttgagacttcatggaacagggtccaggcacagaattccacactctgccctccagttaacaagccaaaacctcacgtacgctcccccatttgcaagtttaaagtttactcgtcctaaatgcagacttcatacctatcttccaaaagttgataaaagcaacgtggcaggtattttcgattttcccattccagatactgcctctatcagtcgacccttaccatttgtaacataatagattgaaacaacaggttaagtgctttggaattaagagttaaagggaaccgggggtggagaaaggaaaagaaggttgagacctccaaaacatagttttctgttctatgggaatttttgctctcattatctgggaagtgttcttaaaaataagaattaatagcaaagatgcagcaaagctctgaggatgcatttgcctgatatttttttctttgctcttgtgtttttgtatgtagttataaatactgtagattttttttttgtgattttttgccaaagttgttgttctatttatacattttaatgtcttaagacattttttcaatatcacaaaaagattttactgcgtattttgcaaagaaaaaaagctcactacctttagcttgcacatacttgcaaagttaattaaaaggctttttgttttaaaggggattttgtaaaatatccatataaataatgtatttatctttcgaatttgtacattgcttttcccttcttcctcttccttccacccccaatttattttattgtgtatgtttgctacgtgaaaagtgcgtatttgtttggtcacctacacttgtattagctgtttcaatgtgatttttaaacatttcatttatagttatttttagtattgttataaaccatgcttcagtttttttaatttccacccaaaagtcattgtctatttttgtattatttgtaagttaagaagttttttccaatatatggcaaaaaaaaaaaaatagtagcatattattcttgtagtatttagttcagtagatttaaaaaaaaatgtatcctttgctttggaagcttacaaaacaaccctaatgctgttttactctattaatatgcatggaatctctccctttggagtgacgcattttgtgcattaaattctagggagaaacttcatagaaatcaatgaacatactttctttcttaagtctgcttgtatatttcctctgtctttcacataaatataaaccagcagattggatgccttaacaatgcaaatcatattcatttcacttgtacattgtaactgtgcaccagaactgtcagtcatcactaacattctaagaaaaaagaaaaagaaaaaaagaaaaaaaaaaaaacaaagaaatcgaaaagcacaaaagaactgttttgttaccttaagacaatgtaactttttctagtagagcaagaaatcatttacaacaatgctgcaactgtgcatgcccccatatggattttgcaatggttttcactaggctgtcaagagtgcgatttttatgggttggggtgggtgggggaggggagttgtgggagggtaggggagggaggaaagctgtttttcatggtgagaaataataatgatgactaataataataaaaaaaactggaaaatgtaagcaaggtggacgcattgcttctcggtactcagaaaggttatctgaatttgcgtggtaagcgctggcctgaagatgtacacaagttaaagccatattttatctggtgagccccttaactgtttctgaaggaatgaacggtcagccgggaaggtgtccggcttagaccttgacaacagacactacccatctgtcagccatgtgcagtggttagaactcttcttgaaagtccaaagagcctttaaaatgtgtataatttgtgttttgttgcttctatttctattgattagatgaaaagacattctggccctctgatcctctttcttctccacaaaagttttacaaataaaagatgttcccctaaatacagaatatggctttaagaagaaaatgaaatgaagaattaaattaagatttcagtgttgggggaaaaaatacagcttctggatgactggattgcataacattgccctggcctcacattgtactaggatgcagcttaaatgaagtcatctctaaatctactaacctttcaccttcttatcaaaactttttgaatagacacacactgtacagttcaattgttagagaacctaactactgtagagattgttaaattttttttttttttttgcaaaaattcaagctgtaaaaacttttcaactttcacaatatttaattaaagttacttcctgtctgtga

SEQ ID NO: 8062 - DNA, 3948 bp, Homo sapiens
aaactccacggtaacggggaccaatgttgttagaggttgaggttcctggtaggtcccaggtgctaaaaggaagagcagcctttgggatgtgagcccgaaaaccatcgtgttggcttctgaagccccaagatgggcatggcagggacgcggaagccctcagaaccgcggaagccctcagaaccgcacagcaggtggccgccgtggtgcagcgcgcagtcggccctcagctcccctgcaccggcgcgagctgcgggcgctgcccacgtcaggctctgcagacaccagacagaaaagaattcagcttagagaactatcaacacaggacaatgcaagcccatgagctgttccggtattttcgaatgccagagctggttgacttccgacagtacgtgcgtactcttccgaccaacacgcttatgggcttcggagcttttgcagcactcaccaccttctggtacgccacgagacccaaacccctgaagccgccatgcgacctctccatgcagtcagtggaagtggcgggtagtggtggtgcacgaagatccgcactacttgacagcgacgagcccttggtgtatttctatgatgatgtcacaacattatacgaaggtttccagaggggaatacaggtgtcaaataatggcccttgtttaggctctcggaaaccagaccaaccctatgaatggctttcatataaacaggttgcagaattgtcggagtgcataggctcagcactgatccagaagggcttcaagactgccccagatcagttcattggcatctttgctcaaaatagacctgagtgggtgattattgaacaaggatgctttgcttattcgatggtgatcgttccactttatgatacccttggaaatgaagccatcacgtacatagtcaacaaagctgaactctctctggtttttgttgacaagccagagaaggccaaactcttattagagggtgtagaaaataagttaataccaggccttaaaatcatagttgtcatggatgcctacggcagtgaactggtggaacgaggccagaggtgtggggtggaagtcaccagcatgaaggcgatggaggacctgggaagagccaacagacggaagcccaagcctccagcacctgaagatcttgcagtaatttgtttcacaagtggaactacaggcaaccccaaaggagcaatggtcactcaccgaaacatagtgagcgattgttcagcttttgtgaaagcaacagagaatacagtcaatccttgcccagatgatactttgatatctttcttgcctctcgcccatatgtttgagagagttgtagagtgtgtaatgctgtgtcatggagctaaaatcggatttttccaaggagatatcaggctgctcatggatgacctcaaggtgcttcaacccactgtcttccccgtggttccaagactgctgaaccggatgtttgaccgaattttcggacaagcaaacaccacgctgaagcgatggctcttggactttgcctccaagaggaaagaagcagagcttcgcagcggcatcatcagaaacaacagcctgtgggaccggctgatcttccacaaagtacagtcgagcctgggcggaagagtccggctgatggtgacaggagccgccccggtgtctgccactgtgctgacgttcctcagagcagccctgggctgtcagttttatgaaggatacggacagacagagtgcactgccgggtgctgcctgaccatgcctggagactggaccgcaggccatgttggggccccgatgccgtgcaatttgataaaacttgttgatgtggaagaaatgaattacatggctgccgagggcgagggcgaggtgtgtgtgaaagggccaaatgtatttcagggctacttgaaggacccagcgaaaacagcagaagctttggacaaagacggctggttacacacaggggacattggaaaatggttaccaaatggcaccttgaaaattatcgaccggaaaaagcacatatttaagctggcacaaggagaatacatagcccctgaaaagattgaaaatatctacatgcgaagtgagcctgttgctcaggtgtttgtccacggagaaagcctgcaggcatttctcattgcaattgtggtaccagatgttgagacattatgttcctgggcccaaaagagaggatttgaagggtcgtttgaggaactgtgcagaaataaggatgtcaaaaaagctatcctcgaagatatggtgagacttgggaaggattctggtctgaaaccatttgaacaggtcaaaggcatcacattgcaccctgaattattttctatcgacaatggccttctgactccaacaatgaaggcgaaaaggccagagctgcggaactatttcaggtcgcagatagatgacctctattccactatcaaggtttagtgtgaagaagaaagctcagaggaaatggcacagttccacaatctcttctcctgctgatggccttcatgttgttaattttgaatacagcaagtgtagggaaggaagcgttcgtgtttgacttgtccattcggggttcttctcataggaatgctagaggaaagagaacactgccttacagtcacctcatgttgcagaccatgtttatggtaatacacactttccaaaatgagccttaaaaattgtaaaggggatactataaatgtgctaagttatttgagacttcctcagtttaaaaagtgggttttaaatcttctgtctccctgtttctctaatcaaggggttaggactttgctatctctgagatgtctgctacttgctgcaaattctgcagctgtctgctgctctaaagagtacagtgcactagagggaagtgttccctttaaaaataagaacaactgtcctggctggagaatctcacaagcggaccagagatctttttaaatccctgctactgtcccttctcacaggcattcacagaacccttctgattcgtaagggttacgaaactcatgttcttctccagtcccctgtggtttctgttggagcataaggtttccagtaagcgggagggcagatccaactcagaaccatgcagataaggagcctctggcaaatgggtgctcatcagaacgcgtggattctctttcatggcagaatgctcttggactcggttctccaggcctgattccccgactccatcctttttcaggggttatttaaaaatctgccttagattctatagtgaagacaagcatttcaagaaagagttacctggatcagccatgctcagctgtgacgcctgaataactgtctactttatcttcactgaaccactcactctgtgtaaaggccaacagatttttaatgtggttttcatatcaaaagatcatgttgggattaacttgcctttttccccaaaaaataaactctcaggcaagcatttctttaaagctattaagggagtatatacttgagtacttattgaaatggacagtaataagcaaatgttcttataatgctacctgatttctatgaaatgtgtttgacaagccaaaattctaggatgtagaaatctggaaagttcatttcctgggattcacttctccagggattttttaaagttaatttgggaaattaacagcagttcactttattgtgagtctttgccacatttgactgaattgagctgtcatttgtacatttaaagcagctgttttggggtctgtgagagtacatgtattatatacaagcacaacagggcttgcactaaagaattgtcattgtaataacactacttggtagcctaacttcatatatgtattcttaattgcacaaaaagtcaataatttgtcaccttggggttttgaatgtttgctttaagtgttggctatttctatgttttataaaccaaaacaaaatttccaaaaacaatgaaggaaaccaaaataaatatttctgcatttca

SEQ ID NO: 8063 - DNA, 875 bp, Homo sapiens
gacaatgacaacatcccagatattgatgatgtgtgtcctgaaaacaatgccatcagtgagacagacttcaggaacttccagatggtccccttggatcccaaagggaccacccaaattgatcccaactgggtcattcgccatcaaggcaaggagctggttcagacagccaactcggaccccggcatcgctgtaggttttgacgagtttgggtctgtggacttcagtggcacattctacgtaaacactgaccgggacgacgactatgccggcttcgtctttggttaccagtcaagcagccgcttctatgtggtgatgtggaagcaggtgacgcagacctactgggaggaccagcccacgcgggcctatggctactccggcgtgtccctcaaggtggtgaactccaccacggggacgggcgagcacctgaggaacgcgctgtggcacacggggaacacgccggggcaggtgcgaaccttatggcacgaccccaggaacattggctggaaggactacacggcctataggtggcacctgactcacaggcccaagactggctacatcagagtcttagtgcatgaaggaaaacaggtcatggcagactcaggacctatctatgaccaaacctacgctggcgggcggctgggtctatttgtcttctctcaagaaatggtctatttctcagacctcaagtacgaatgcagagatgaacatctaacccactagaggaaaccagtttggtgatatatgagactttatgtggagtgaaaattgggcatgccattacattgctttttcttgtttgtttaaaaagaatgacgtttacatataaaatgtaattacttattgtatttatgtgtatatggagttgaagggaa

SEQ ID NO: 8064 - DNA, 558 bp, Homo sapiens
agactcgagcgggagggggttggggggatgcaggacaggcgggttgggcggccggcggcggctccccggctacctgtgtggccctcgacctggctcagacccccgggcagtccctgggggctctttcctcggcttttaaggaaagttctgaatgtagtgagtgccagaagctctgctctcgccgcggtccgctccacccgctcatcgtgggggtcgcgccgtttgtttaattcctggcaaaaggcgagcgggccagcggttgcgaggcaggtgcaatgattctggactgagacgcgcttgggcagaggctatgtaatcgtgtctgtgttgaggacttcgcttcgaggagggaagaggagggatcggctcgctcctccggcggcggcggcggcggcgactctgcaggcggagtttcgcggcggcggcaccagggttacgccagccccgcggggaggtctctccatccagcttctgcagcggcgaaagccccagcgcccgagcgcctgagccggcggggagcaagtaaagctagaccgatctccggggagccccggagta

SEQ ID NO: 8065 - DNA, 2152 bp, Homo sapiens
ttgtagagatggggtttcatcatgttggccaggctggtcttgaactcctgacctcaagtaatccacccgcctcggcctcccaaagtgctgggtttacaggcgtgagccaccgcgccctgcttgaatcctgatatcttagcattggagagagattttccatgttattagtcttcaaaaatattttaaatgtttgtataacattccatcctatgagcatgtcacaacttatttaatcaattccatgtggctggacactaaggttaatttccggtttgttaaatattactgtgatgagcaaccttttaatgtctacgtccacatctgatgatttccttaagataattatcagaagggtgatatttctgagttaaaaagtatgagttcttaaggctcttgatacagattgccaaactgctttccagaaagtttctcccagtttacactcccacaacagcttcccagagttggcattaaacactgaaagaagtgtctcctgtgaggcttcactagaaagctggctgtcccatgggcaggagggagctgtgagatgttgtgagcatggtcccgcatgctcagaacgaggcctggaagaaccctctggctgcaggatggagacagtgctggagggggcaggtgggggaccactgtgggggctgacaccataatgcagggagagttgcctgagagtcgcacaagggactagagagtcgcacgagggattagagattttgtggggagcgctggtttctggttggaacggttaggttttgagactggcctgtggagcgctttgagccgtggtgggggcgctgagggtcagctgaagggttatctttttttttttttttgagatggagtcttgctctgttgcccaggctggagtgcaatggcatgatctcggttcactgcaacctccgcctcccgggttcaagtgattcttccacctcagcctcccgaggagctgggattacaggcacacgacaccatgcccggctactttttgtatttttgtagagactgggtttcaccatgttggccaggttggtcttgaactcctgacctcctcagatgatccgcccacctcggcctcccaaagtgctgggattacaggcgtgagccaccatgcctggcccagttgaagggttgtacctgttagctgctcttgctgccccagggcaaggccggatatggacttgggctactggaggagaaaagccattttggagcaaacaaactggttaagagacagcagtggcgtgtgggagaaaagagcttgtttgggggccttggctctaacacttagctttctgtatcctccgggcctcagtttcttcattcacaaaggagggatgaaaagctgagcagagaaggggagttgcagggaggccctgcaggggcgatgtggcagccctggggagcagcaggctggacctgggttttgaccctggggcatgggacttctcagcttttctctggaagaggagccaggaacccctttccggggagctgaccacagctctgtcctggcaggtacaatgcccaggagtactacgatcgcattcctgagcttcggcaggtcattgagcagctgagcagtggcttcttctcccccaaacagcccgacctgttcaaggacattgtcaatatgctcatgcaccatgaccggtttaaagtcttcgcagattatgaagactacattaaatgccaggagaaagtcagcgccttgtacaagaacccaagagagtggacgcggatggtgatccggaacatagccacctctggcaagttctccagtgaccgcaccattgcccagtatgcccgggagatctggggtgtggagccttcccgccagcgcctgccagccccggatgaggccatctgagcctccagaccagaccccaaaccagcccttgagtctgtcacactctcttgggccagccccagcacctcatgcagagggtggggtactggagttagatctctaagcccctcctggaaccctcattttccccactctcaatgtcccagtgtccagcgtgactaaggacacgggcccccttccgtcctcgggctcccggtcccctcctatttatggggtctgaccaactgcacccactccctaataaattcattctccttgggagcctcctta

SEQ ID NO: 8066 - DNA, 2746 bp, Homo sapiens
tgggaacaggtggtcccaggtcgtttcctggctagatttgccttgtctggctcctgcccctgagttgcacaggggaggtatggtggggtcttgccttctgtggagaagatgcttcattcccagcccaggttcccagcaagccccaaccatctccttctccctgatggttgcccatgggctcaggaggggacagatggatgcctgtgtcaggagcccctctctccctctcttggagagagtcctgagtgcccccccttcttgggggctttgtttgggaagctggatgagcctggtccatggagagtttaaaaagtcttttggtgttacctggtaatggggcacatctcagcccagatagggtgggagggagctgtgaaacacagggagggggttgctttcgggtatctactaggagtcagggtgaagcctagagaggatgaaagaaggggaggggatggggagtggtaagaacctaggatttgaattcccagcctggccaacccttgcagccatgtcttggcctcaagtggaacaagggctccttgaggccagcagggttgggggagttggggtgggcctgagcctctttcctgctagagctcttggtcctccctgcctccaccacccatccctgctctgcagaacccctgggtgctgagtggcaggagccccagggttgtcccatctgggtatggctggctgggtcactaacctctgtgatctgcttccttcctttccagattatgcggatcaaacctcaccaaggccagcacataggagagatgagcttcctacagcacaacaaatgtgaatgcagaccaaagaaagatagagcaagacaagaaaaatgtgacaagccgaggcggtgagccgggcaggaggaaggagcctccctcagggtttcgggaaccagatctctcaccaggaaagactgatacagaacgatcgatacagaaaccacgctgccgccaccacaccatcaccatcgacagaacagtccttaatccagaaacctgaaatgaaggaagaggagactctgcgcagagcactttgggtccggagggcgagactccggcggaagcattcccgggcgggtgacccagcacggtccctcttggaattggattcgccattttatttttcttgctgctaaatcaccgagcccggaagattagagagttttatttctgggattcctgtagacacacccacccacatacatacatttatatatatatatattatatatatataaaaataaatatctctattttatatatataaaatatatatattctttttttaaattaacagtgctaatgttattggtgtcttcactggatgtatttgactgctgtggacttgagttgggaggggaatgttcccactcagatcctgacagggaagaggaggagatgagagactctggcatgatcttttttttgtcccacttggtggggccagggtcctctcccctgcccaggaatgtgcaaggccagggcatgggggcaaatatgacccagttttgggaacaccgacaaacccagccctggcgctgagcctctctaccccaggtcagacggacagaaagacagatcacaggtacagggatgaggacaccggctctgaccaggagtttggggagcttcaggacattgctgtgctttggggattccctccacatgctgcacgcgcatctcgcccccaggggcactgcctggaagattcaggagcctgggcggccttcgcttactctcacctgcttctgagttgcccaggagaccactggcagatgtcccggcgaagagaagagacacattgttggaagaagcagcccatgacagctccccttcctgggactcgccctcatcctcttcctgctccccttcctggggtgcagcctaaaaggacctatgtcctcacaccattgaaaccactagttctgtccccccaggagacctggttgtgtgtgtgtgagtggttgaccttcctccatcccctggtccttcccttcccttcccgaggcacagagagacagggcaggatccacgtgcccattgtggaggcagagaaaagagaaagtgttttatatacggtacttatttaatatccctttttaattagaaattaaaacagttaatttaattaaagagtagggttttttttcagtattcttggttaatatttaatttcaactatttatgagatgtatcttttgctctctcttgctctcttatttgtaccggtttttgtatataaaattcatgtttccaatctctctctccctgatcggtgacagtcactagcttatcttgaacagatatttaattttgctaacactcagctctgccctccccgatcccctggctccccagcacacattcctttgaaataaggtttcaatatacatctacatactatatatatatttggcaacttgtatttgtgtgtatatatatatatatatgtttatgtatatatgtgattctgataaaatagacattgctattctgttttttatatgtaaaaacaaaacaagaaaaaatagagaattctacatactaaatctctctccttttttaattttaatatttgttatcatttatttattggtgctactgtttatccgtaataattgtggggaaaagatattaacatcacgtctttgtctctagtgcagtttttcgagatattccgtagtacatatttatttttaaacaacgacaaagaaatacagatatatctt

SEQ ID NO: 8067 - DNA, 1763 bp, Homo sapiens
ggcccatccagaggtggcccacgtagcgggacagcgctgtcggcccggcgcgcctcggagtgtcacggcgcctcgtccaagtggagccccgaacccctgaaggcgcggcaggctctggagagcggggtcttgtgcgcctgggccagtaattgacctgctgactgtgggcgagtctcggcagatggtagctgtggcagagaagatccggacagccttgctcactgctggggacatctacctcttatccaccttccgcctgccccccaagcagggtggtgtcctctttggcctctattctcgccaagacaacactcgatggctggaggcctctgttgtaggcaagatcaacaaagtactggtgcgataccagcgggaggatggcaaagtccacgccgtgaacctacagcaagcgggcctggctgatgggcgcacacacacagttctcctgcgactccgaggtccctccagacccagccctgccctacatctctacgtggactgcaaactgggtgaccaacatgcaggccttccagcactggcccccattcctccagcggaggtcgatgggctggagattaggactggacagaaggcgtatttgaggatgcagggctttgtggaatctatgaaaattattctgggtgggtccatggcccgggtaggagccctgagtgagtgtccattccaaggggacgagtccatccacagtgcagtgaccaatgcactgcactccattctaggggagcagaccaaggcgctggtcacccaactcaccctcttcaaccagatcctggtggagctgcgggatgatatacgagaccaggtgaaggaaatgtccctgatccgaaacaccattatggagtgtcaggcttccatgagcagcgttcccactgcagccccaatccctgcttccgaggtgtggactgcatggaagtgtacgagtacccaggctaccgctgtgggccctgcccccctggcctgcagggcaacggcacccactgcagtgacatcaatgagtgtgctcacgctgacccctgtttcccgggctccagctgcatcaacaccatgcccggcttccactgtgaggcctgtcctcgagggtacaagggcacacaggtgtctggtgtgggcattgactatgcccgggccagcaaacaggtctgcaatgacatcgatgaatgcaacgatggcaacaatggtggctgtgacccaaactccatctgcaccaacactgtgggctctttcaagtgtggtccctgccgcctgggtttcctgggcaaccagagccagggctgcctcccagcccggacctgccacagcccagcccacagcccctgccacatccatgctcactgtctctttgaacgcaatggtgcagtgtcctgccagtgtaacgtgggctgggctgggaatgggaacgtgtgtgggactgacacagacatcgatggctacccagaccaagcactgccctgcatggacaacaacaaacactgcaaacaggacaactgccttttgacacccaactctgggcaggaagatgctgataatgatggtgtgggggaccagtgtgatgatgatgctgatggggatgggatcaagaatgttgaggacaactgccggctgttccccaacaaagaccagcagaactcagatacagattcatttggtgatgcctgtgacaattgccccaacgttcccaacaatgaccagaaggacacagatggcaatggggaaggagatgcctgtgacaacgacgtggatgg

SEQ ID NO: 8068 - DNA, 696 bp, Homo sapiens; identical to SEQ ID NO: 7155

SEQ ID NO: 8069 - DNA, 772 bp, Homo sapiens
aaggtaggctaagtaaataagcaaatggcaacgtgccttgcaggatatctcgaaatgcttagagaaaggatgtggcaatgcaggaccgcttccagagattccagagctgcccagtattgctgcagaagtcatcagcacgtagaagaatacagaggacttgtgcatcaaacatctcagttaatcctcagaacaatttgagtgttcccatttgactacttgaggtgacatagccaataagagctggagccaggactcagacataggccatcatttctaagtaaaattatttttctaaggaaaacattacacatattagaaggatgcattcctcagggttttgtgagactgtgaagataattattcgtgatcagagaagtgttcttgcttcagcagtcttgggattggcgtctatagtctgtacgggcttggtatcatacactacccttcctgcaatttttattccattcttcctatggatggctggctaacttcatacccccatgtcagtgtgtgtattctgtatgtaaatatgtttatatttatagagcatcaatcaatataagcattattgagaaaaatgtgacccgtaacactgtgttctggataaaaatgtgattaggaatcacgcaaagtgcttactgtgtaagcccaagaacaaaggctttctgaatcttctcaggcagttcagatttaaagcaccatccaaaccttggaaatacgacagggtgtggtagaattcagcaatatgagaaaaccagcccctaaaatgata

SEQ ID NO: 8070 - DNA, 493 bp, Homo sapiens
ggcaatgcaggaccgcttccagagattccagagctgcccagtattgctgcagaagtcatcaggtgtccacccacagtgtagttcaaacgacaaaggcacgtagaagaatacagaggacttgtgcatcaaacatctcagttaatcctcagaacaatttgagtgttcccatttgactacttgaggtgacatagccaataagagctggagccaggactcagacataggccatcatttctaagtaaaattatttttctaaggaaaacattacacatattagaaggatgcattcctcagggttttgtgagactgtgaagataattattcgtgatcagagaagtgttcttgcttcagcagtcttgggattggcgtctatagtctgtacgggcttggtatcatacactacccttcctgcaatttttattccattcttcctatggatggctggctaacttcatacccccatgtcagtgtgtgtattctgtatgtaaatatg

SEQ ID NO: 8071 - DNA, 577 bp, Homo sapiens
accagaccgcggacgtctgtaatctcagaggcttgtttgctgagggtgcctgcgcagctgcgacggctgctgtgtctcctggaaagggattcccgaaaggttttattccaaaaggagaggttggaagacatagctcatctcctgctgtgtatcagccaagaaggtgtgaggtggtgttccttggggatccgcttgcatctacttgggatggttttgaaacatgaatctttcgctcgtcctggctgccttttgcttgggaatagcctccgctgttccaaaatttgaccaaaatttggatacaaagtggtaccagtggaaggcaacacacagaagattatatggcgcgaatgaagaaggatggaggagagcagtgtgggaaaagaatatgaaaatgattgaactgcacaatggggaatacagccaagggaaacatggcttcacaatggccatgaatgcttttggtgacatgaccaatgaagaattcaggcagatgatgggttgctttcgaaaccagaaattcaggaaggggaaagtgttccgtgagcctctgtttcttgatcttcccaaatctgtggat

SEQ ID NO: 8072 - DNA, 696 bp, Homo sapiens
acctcacagtgaccgaggttagctgggatgctctcagactgaactggaccacgccagatggaacctatgaccagtttactattcaggtccaggaggctgaccaggtggaagaggctcacaatctcacggttcctggcagcctgcgttccatggaaatcccaggcctcagggctggcactccttacacagtcaccctgcacggcgaggtcaggggccacagcactcgaccccttgctgtagaggtcgtcacagccatgggctccccaaaggaagtcattttctcagacatcactgaaaattcggctactgtcagctggagggcacccacagcccaagtggagagcttccggattacctatgtgcccattacaggaggtacaccctccatggtaactgtggacggaaccaagactcagaccaggctggtgaaactcatacctggcgtggagtaccttgtcagcatcatcgccatgaagggctttgaggaaagtgaacctgtctcagggtcattcaccacagctctggatggcccatctggcctggtgacagccaacatcactgactcagaagccttggccaggtggcagccagccattgccactgtggacagttatgtcatctcctacacaggcgagaaagtgccagaaattacacgcacggtgtccgggaacacagtggagtatgctctgaccgacc

SEQ ID NO: 8073 - DNA, 924 bp, Homo sapiens
ggtcaggaaagctcaggcaagcccaccctcaggcactacagctagactccgagcttactgggcagtcatctgattcgaccaacatcagttcgcagggcttaagcccagtcccttacggcggcctggggagggaccaggcccaagtatataaagctccctgagggtccgcgttggctttgcgcctgtgagtgtgattcaagaacgtcccagtgcccttggctcctttcggagtgtgaccccgtgcttgcacgggacacgttacccagctcgggtgagaagggtatcttccgggaacctcgcctttaatagcacaacgagcgcagagtccactggatctgcgagaagaaaccgcgctaactagtttgtccctacggccgcctcgtagtcactgccgcggcgccttgagtctccgggccgccttgccatggctgcccgtggtgtcatcgctccagttggcgagagtttgcgctacgctgagtacttgcagccctcggccaaacggccagacgccgacgtcgaccagcagagactggtaagaagtttgatagctgtaggactgggtgttgcagctcttgcatttgcaggtcgctacgcatttcggatctggaaacctctagaacaagttatcacagaaactgcaaagaagatttcaactcctagcttttcatcctactataaaggaggatttgaacagaaaatgagtaggcgagaagctggtcttattttaggtgtaaggtaggtgtgcagcataagtattgttttgttgtgtggccaagcttgtctttaaaaaagagaaaacgttacaataaggttatacttagacttaaaattatgagtaggtggcagaggagaaaatatcaaatttttatattttaaagcctcaaatctaaaagtatcccactcccctaaaaaaacaaaacaaaa

SEQ ID NO: 8074 - DNA, 1937 bp, Homo sapiens
tctccgctccgcgaatctcctccggccactgccgccgcggtcgcctctcacccgcccggccgctccagcccgaggcgccccgaccccgcgccactccgcgcccggccagccgcccgcagccatggggctcctgcccaagctcggcgcgtcccagggcagcgacacctctactagccgagccggccgctgtgcccgctcggtcttcggcaacattaaggtgtttgtgctctgccaaggcctcctgcagctctgccaactcctgtacagcgcctacttcaagagcagcctcaccaccattgagaagcgctttgggctctccagttcttcatcgggtctcatttccagcttgaatgagatcagcaatgccatcctcatcatctttgtcagctactttggcagccgggtgcaccgtccacgtctgattggcatcggaggtctcttcctggctgcaggtgccttcatcctcaccctcccacacttcctctccgagccctaccagtacaccttggccagcactgggaacaacagccgcttgcaggccgagctctgccagaagcattggcaggacctgcctcccagtaagtgccacagcaccacccagaacccccagaaggagaccagcagcatgtggggcctgatggtggttgcccagctgctggctggcatcgggacagtgcctattcagccatttgggatctcctatgtggatgacttctcagagcccagcaactcgcccctgtacatctccatcttatttgccatctctgtatttggaccggctttcgggtacctgctgggctctgtcatgctgcagatctttgtggactatggcagggtcaacacagctgcagttaacttggtcccgggtgacccccgatggattggagcctggtggctaggcctgctcatttcttcagctttattggttctcacctctttccccttttttttcttccctcgagcaatgcccataggagcaaagagggctcctgccacagcagatgaagcaaggaagttggaggaggccaagtcaagaggctccctggtggatttcattaaacggtttccatgcatctttctgaggctcctgatgaactcactcttcgtcctggtggtcctggcccagtgcaccttctcctccgtcattgctggcctctccaccttcctcaacaagttcctggagaagcagtatggcacctcagcagcctatgccaacttcctcattgcacatcaagttctatacatccgcagtctcctgcctgccgcagggactgctcgtgcccagattctatcttccacccggtctgtggagacaatggaatcgagtacctctccccttgccatgccggctgcagcaacatcaacatgagctctgcaacctccaagcaactgatctatttgaactgcagctgtgtgaccgggggatccgcttcagcaaagacaggatcgtgccctgtcccctgtgcccacttcctgctcccggccatcttcctcatctccttcgtgtccctgatagcctgcatctcccacaaccccctctacatgatggttctgcgtgtggtgaaccaggaggaaaagtcatttgccatcggggtgcagttcttgttgatgcgcttgctggcctggctgccatctccagccctctatggcctcaccattgaccactcctgcatccggtggaactcgctgtgcttggggaggcgaggggcctgcgcctactatgacaacgatgctctccgagacaggtacctgggcctgcagatgggctacaaggcgctgggcatgctgctgctttgcttcatcagctggagggtgaagaagaacaaggagtacaacgtgcagaaggcggcaggcctcatctgaccccaccctgggccactgccctgctccagagagtggaccttgactcttccacacctgcctatactcactaatgt

SEQ ID NO: 8075 - DNA, 583 bp, Homo sapiens
atgctggaggttcgctagccgaagcggctgcatctggcgccgcgtctgccccgcgtgctcggagcggattctgcccgccgtccccggagccctcggcgccccgctgagcccgcgatcacttcctccctgtgaccaaccggcgctgcaggttagagcctggcaatgccgtttgggtgtgtgactctgggcgacaagaagaactataaccagccatcggaggtgactgacagatatgatttgggacaggtcatcaagacgtgagtgccgggcctgtcaggcaaggctgggtgggctggtgagcaggggctagggaagtggcagtggagtgcagctgatgctaaggccaggcctgagtgggtgcctgtcggctgcagtgaggagttttgtgaaatcttccgggccaaggacaagacgacaggcaagctgcacacctgcaagaagttccagaagcgggacggccgcaaggtgcggaaagctgccaagaacgagataggcatcctcaagatggtgaagcatcccaacatcctacagctggtggatgtgtttgtgacccgcaaggagtactttatcttcctggagctgt

SEQ ID NO: 8076 - DNA, 3061 bp, Homo sapiens
gcgaacatctcctcggagcgcagctgggccagcggttcccacagccctggagcccaacgtgcgcagaagcgcctcttggagctcctctcccacagatctctcgtcctcttcctgggctaggccgccccaggcgcggcccctgcgactcctggcacggccccgtgctcggctgccgccctggcgcgcgccacactgtcgtccccggacgggcgcggaccggctcggccggggcgccggcggctggggaggggtcgctggccccggggccgcgcatgcgccgccaccaacttggggctgtcagtggagggcgagtgctggttctcaggggaggcgacgcccttcggggccaacgggcctcgagccgaggcagcagtgggaacgactcatcctttttccagccctggggcgtggctggggtcggggtcggggtcggggccggtgggggccccgcccccgtctcctggcctgcccccttcatgggccgcgatgatggcggccctgtacccgagcacggacctctcgggcgcctcctcctcctccctgccttcctctccatcctcttcctcgccgaacgaggtgatggcgctgaaggatgtgcgggaggtgaaggaggagaatacgctgaatgagaagcttttcttgctggcgtgcgacaagggtgactattatatggttaaaaagattttggaggaaaacagttcaggtgacttgaacataaattgcgtagatgtgcttgggagaaatgctgttaccataactattgaaaacgaaaacttggatatactgcagcttcttttggactacggttgtcagtctgcagatgcacttttggtggcaatcgactctgaagtagtgggagctgttgatatactacttaatcatcgaccaaaacgatcatcaagaccaactatagtaaaactaatggaacgaattcagaatcctgagtattcaacaactatggatgttgcacctgtcattttagctgctcatcgtaacaactatgaaattcttacaatgctcttaaaacaggatgtatctctacccaagccccatgcagttggctgtgaatgcacattgtgttctgcaaaaaacaaaaaggatagcctccggcattccaggtttcgtcttgatatatatcgatgtttggccagtccagctctaataatgttaacagaggaggatccaattctgagagcatttgaacttagtgctgatttaaaagaactaagtcttgtggaggtggaattcaggaatgattatgaggaactagcccggcaatgtaaaatgtttgctaaggatttacttgcacaagcccggaattctcgtgaattggaagttattctaaaccatacgtctagtgacgagcctcttgacaaacggggattattagaagaaagaatgaatttaagtcgtctaaaacttgctatcaaatataaccagaaagagtttgtctcccagtctaactgccagcagttcctgaacactgtttggtttggacagatgtcgggttaccgacgcaagcccacctgtaagaagataatgactgttttgacagtaggcatcttttggccagttttgtcactttgttatttgatagctcccaaatctcagtttggcagaatcattcacacaccttttatgaaatttatcattcatggagcatcatatttcacatttctgctgttgcttaatctatactctcttgtctacaatgaggataagaaaaacacaatggggccagcccttgaaagaatagactatcttcttattctgtggattattgggatgatttggtcagacattaaaagactctggtatgaagggttggaagactttttagaagaatctcgtaatcaactcagttttgtcatgaattctctttatttggcaacctttgccctcaaagtggttgctcacaacaagtttcatgattttgctgatcggaaggattgggatgcattccatcctacactggtggcagaagggctttttgcatttgcaaatgttctaagttatcttcgtctcttttttatgtatacaaccagctctatcttgggtccattacagatttcaatgggacagatgttacaagattttggaaaatttcttgggatgtttcttcttgttttgttttctttcacaattggactgacacaactgtatgataaaggatatacttcaaaggagcagaaggactgtgtaggcatcttctgtgaacagcaaagcaatgataccttccattcgttcattggcacctgctttgctttgttctggtatattttctccttagcgcatgtggcaatctttgtcacaagatttagctatggagaagaactgcagtcctttgtgggagctgtcattgttggtacatacaatgtcgtggttgtgattgtgcttaccaaactgctggtggcaatgcttcataaaagctttcagttgatagcaaatcatgaagacaaagaatggaagtttgctcgagcaaaattatggcttagctactttgatgacaaatgtacgttacctccacctttcaacatcattccctcaccaaagactatctgctatatgattagtagcctcagtaagtggatttgctctcatacatcaaaaggcaaggtcaaacggcaaaacagtttaaaggaatggaggaatttgaaacagaagagagatgaaaactatcaaaaagtgatgtgctgcctagtgcatcgttacttgacttccatgagacagaagatgcaaagtacagatcaggcaactgtggaaaatctaaacgaactgcgccaagatctgtcaaaattccgaaatgaaataagggatttacttggctttcggacttctaaatatgctatgttttatccaagaaattaaccattttctaaatcatggagcgaataattttcaataacagatccaaaagactatattgcataacttgcaatgaaattaatgagatatatattgaaataaagaattatgtaaaagccattctttaaaatatttatagcataaatatatgttatgtaaagtgtgtatatagaattagttttttaaaccttctgtt

SEQ ID NO: 8077 - DNA, 1094 bp, Homo sapiens
ccccagactgaagatgggagaacccctggactcgtgggcctggccgtgccctgctgtgcgtgcctagaagctgagcgcctgagaggttgcctcaactcagagaaaatctgcattgtccccatcctggcttgcctggtcagcctctgcctctgcatcgccggcctcaagtgggtatttgtggacaagatctttgaatatgactctcctactcaccttgaccctggggggttaggccaggaccctattatttctctggacgcaactgctgcctcagctgtgtgggtgtcgtctgaggcatacacttcacctgtctctagggctcaatctgaaagtgaggttcaagttacagtgcaaggtgacaaggctgttgtctcctttgaaccatcagcggcaccgacaccgaagaatcgtatttttgccttttctttcttgccgtccactgcgccatccttcccttcacccacccggaaccctgaggtgagaacgcccaagtcagcaactcagccacaaacaacagaaactaatctccaaactgctcctaaactttgtgcccaaatgagtttactggtgatcgctgccaaaactacgtaatggccagcttctacagtacgtccactccctttctgtctctgcctgaataggagcatgctcagttggtgctgctttcttgttgctgcatctcccctcagattccacctagagctagatgtgtcttaccagatctaatattgactgcctctgcctgtcgcatgagaacattaacaaaagcaattgtattacttcctctgttcgcgactagttggctctgagatactaataggtgtgtgaggctccggatgtttctggaattgatattgaatgatgtgatacaaattgatagtcaatatcaagcagtgaaatatgataataaaggcatttcaaagtctcacttttattgataaaataaaaatcattctactgaacagtccatcttctttatacaatgaccacatcctgaaaagggtgttgctaagctgtaaccgatatgcacttgaaatgatggtaagttaattttgattcagaatgtgttatttgtcacaaataaacataataaa

SEQ ID NO: 8078 - DNA, 375 bp, Homo sapiens
gcaaagctgaacacgcccggggagctgtgcatccgagggtactgcgtcatgctgggctactgggagatgtcgccacaatgaatgagcagggcttctgcaagatcgtgggccgctctaaggatatgatcatccggggtggtgagaacatctaccccgcagagctcgaggacttctttcacacacacccgaaggtgcaggaagtgcaggtggtgggagtgaaggacgatcggatgggggaagagatttgtgcctgcattcggctgaaggacggggaggagaccacggtggaggagataaaagctttctgcaaagggaagatctctcacttcaagattccgaagtacatcgtgtttgtcacaaactaccccctcacca

SEQ ID NO: 8079 - DNA, 874 bp, Homo sapiens
gagttccaggagcgaattgcaaacccaccgggaaaatgagcgaagagacggtccccgaggctgcctcgccgccgcccccgcaggggcagccttactttgaccgcttctcagaggacgaccccgagtacatgcgccttcgcaaccgggcggcggacctgcggcaggacttcaacctgatggagcagaagaagcgcgtcaccatgatcctgcagagtccctctttcagggaggagctggaaggcctcatccaggagcagatgaagaaggggaacaactcctccaacatctgggccctgcgacagatcgcggacttcatggccagcacctcccacgcagtcttcccgacatcttccatgaatgtctccatgatgacgcctatcaatgacctccacacagctgactccctgaacctggccaaaggggagcggctcatgcggtgcaagatcagcagtgtctaccgactcctggacctctatggctgggcccagctgagtgacacctatgtcacgttgagagtcagcaaggagcaggaccacttcctgatcagccctaagggagtttcttgcagtgaagtcacagcgtccagcctgatcaaggaagtactggagatgaggaacaagattcgagaacaaaaccgacaagatgtgaagtcagcggggcctcagtcccagctcctggcgagcgtcattgccgagaagagccgaagcccgtctacagagagccagctgatgtccaagggagacgaggataccaaagacgattcagaggagacggtgcccaaccccttcagccaactcactgaccaggagttggaggagtacaagaaagaggtggagaggaagaaactagaacttgatgagacaggacaggaacg

SEQ ID NO: 8080 - DNA, 545 bp, Homo sapiens
gctctgcagtccacaaacctctttctttgcagcagctgcctgcccactctgtttcctcagccctcccagcctgggactcagctcttctttcatgcccagctcaggtctctcactggctttgggtcgactctagcctttgtctcccttctctggatggggataagcagagccagggggcctcattccaggcagttgggttggggggttgggggcaggcaaagctctctccatttccaaggaccacctatcctgaagcaagaggataggaagccccaacctgaggccatcctgtcccaggcccggatcatgaacatggaggcagggacgctggcaaagctgaacacgcccggggagctgtgcatccgagggtactgcgtcatgctgggctactggggtgagcctcagaagacagaggaagcagtggatcaggacaagtggtattggacaggagatgtcgccacaatgaatgagcagggcttctgcaagatcgtgggccgctctaaggatatgatcatccggggtggtgagaacatctaccccgcaga

SEQ ID NO: 8081 - DNA, 570 bp, Homo sapiens
atagagagggccgtggggttagaaagacttccttgtgaatcacccctcttcaaacaatgagcatctgaattgattccctctactccacccctgctacaaagtcccttgaggccatctgagaagaacaatgggatggggtggagacactgaaatcccaaaatgccctggtagtgacatgccaagctggacaccatcacaggatgaagaccactgtgaaagttgtgatgtgtctattccttatcctcggtttgatactctaccctgctggctggggttgccagaaggccatagactactgtggacattatgcatctgcctacaaacctggagactgctccttgggctgggccttttataccgccattgggggcacagtcctcactttcatctgtgctgtcttctctgcacaagcagaaattgcaacctctagtgacaaagtacaggaagaaattgaagaggggaaaaatctgatctgcctcctttagtttggaagagacaatgccattttctcccttgagtaatcttgtgaaacagtccacagtttcatcatttgagtcaagtggagaacta

SEQ ID NO: 8082 - DNA, 640 bp, Homo sapiens
gccaagtcaagaaggagctcagccactatctccccaccgagccagctcagcgggcagggctgggagggagtgggacagattctgggagtgcagcggggaggagtcccggctgggctgagcgcagggagctgcttggcagtgccagagcccaggccccagagccctgctggagaggaggcagactgaggcagcaggccccgccagcaggcgaagcagggagatgtcagactgctacacggagctggagaaggcagtcattgtcctggtggaaaacttctacaaatatgtgtctaagtacagcctggtcaagaacaagatcagcaagagcagcttccgcgagatgctccagaaagagctgaaccacatgctgtcgcattgctgaccctgcttcctccccaggacacagggaaccggaaggctgcggataagctcatccagaacctggatgccaatcatgatgggcgcatcagcttcgatgagtactggaccttgataggcggcatcaccggccccatcgccaaactcatccatgagcaggagcagcagagcagcagctagagacccctttggccacaccttccaggcactggcctgatgccccgccctggtgctctccccaggctccctcctcagcctcctg

SEQ ID NO: 8083 - DNA, 2008 bp, Homo sapiens
gcccacaggaggggcagaagagagatgtctgtgagcaccatggaaaaaaactccagatcttctgtaaggaggatggaaaagtcatttgctgggtttgtgaactgtctcaggaacaccaaggtcaccaaacattccgcataaacgaggtggtcaaggaatgtcaggaaaagctgcaggtagccctgcagaggctgataaaggaggatcaagaggctgagaagctggaagatgacatcagacaagagagaaccgcctggaaggcaggaggagacacctcctaagggataattagacaggaatctgggcaggaccctgggctctatcacaaggagaccccttcctctttgctgtgctagaattaacaagcatagaagtcatttgattaggtctcaatttaactccttccctgttggagtttaggggctggagagtagacatatcataaatcaacactatatttggaagtgaaggcatggagggaaatatctgtgaaaacgcttcctgtgaatcctgtgttccatttgtgtcatcaggtttgaggctccaatccttccagtaaacaccctggagaaagacccaggattccctgtttagggggtttcagtagggggatttttttgtttgtttgtttgttttttgagacagagtctctctctgtcatacaggctggagtgtagtggcgcgatcttggctcactgcaacctctgcctccctggttcaaacgattctcctgcctcagcctcccgagtagctgggactacaggcatgtgccaccatgcccagctaattttttgtatttttagtagagatggggtttcatcatgttagccaggatggtctcaatctcctgaccttgtgatccacccatctcagcctcccaaagtgctgggattacaggcatgagccactgtgccaggccaggtagagggatttaagatacagaaaggcaaagttgttcaggacaggtgtctacaatccaagcctcacccaggcatcacattttgtctcagattaggcctcaataaaactgacttgagtgtattgctttgggaggagctcaggttaaaaagtagaaaaacatggcttcaccagaaattgtgtattggcttttgcctcctattccttttgagaactccctgaggaaaactgttcttatcctgtctcccaggctcatacaaagcaggccttcaaccagccagactgactgcctctttctcttttcattcccaagaattatatccagatcgagagacagaagattctgaaagggttcaatgaaatgagagtcatcttggacaatgaggagcagagagagctgcaaaagctggaggaaggtgaggtgaatgtgctggataacctggcagcagctacagaccagctggtccagcagaggcaggatgccagcacgctcatctcagatctccagcggaggttgaggggatcgtcagtagagatgctgcaggatgtgattgacgtcatgaaaaggagtgaaagctggacattgaagaagccaaaatctgtttccaagaaactaaagagtgtattccgagtaccagatctgagtgggatgctgcaagttcttaaagagctgacagatgtccagtactactgggtggacgtgatgctgaatccaggcagtgccacttcgaatgttgctatttctgtggatcagagacaagtgaaaactgtacgcacctgcacatttaagaattcaaatccatgtgatttttctgcttttggtgtcttcggctgccaatatttctcttcggggaaatattactgggaagtagatgtgtctggaaagattgcctggatcctgggcgtacacagtaaaataagtagtctgaataaaaggaagagctctgggtttgcttttgatccaagtgtaaattattcaaaagtttactccagatatagacctcaatatggctactgggttataggattacagaatacatgtgaatataatgcttttgaggactcctcctcttctgatcccaaggttttg

SEQ ID NO: 8084 - DNA, 241 bp, Homo sapiens
tttattttggaggaagcaattacaggggattttgctttggtgaaagcctggaaggcggaccgagcaggaaacgtgattttcaggaaaagtgcaaggaatttcaacttgccaatgtgcaaagctgcagaaaccacagtggtagaggggaagatggtgaaaggaatgggaggtgctatggatttagtgtccagtgcgaaaaccaaagtggtggtcaccatggagcattctgcaaagggaaatg

SEQ ID NO: 8085 - DNA, 544 bp, Homo sapiens
actttaaaagtttactcgggccgggacgcagggcaaagcgagccatggctgtctacgtcgggatgctgcgcctggggaggctgtgcgccgggagctcgggggtgctgggggcccgggccgccctctctcggagttggcaggaagccaggttgcagggtgtccgcttcctcagttccagagaggtggatcgcatggtctccacgcccatcggaggcctcagctacgttcaggggtgcaccaaaaagcatcttaacagcaagactgtgggccagtgcctggagaccacagcacagagggtcccagaacgagaggccttggtcgtcctccatgaagacgtcaggttgacctttgcccaactcaaggaggaggtgggtcctgacctggaaacctcaaagtgggcaagtactagctcccaagctgccctagctgggcagaaccaggagcgtgggcacctggctatggggcaatgtgctagggctgccagagaaccccgagggatggcaggagaaggagacaggactgacgcacaaggggtccaatgcct

SEQ ID NO: 8086 - DNA, 612 bp, Homo sapiens
gtggcaggatcctccttcatgagaagatggaagcatggtgttgtttttgcctggttttgctcaaatgtcatgcacaccaggcaccttttgattgtaaaccagcctttcctgtattggtctgcgtacaccatgattgtcccttaggggaactgtgagtgtggggctcctctgtcctcatggagttggtggagctcatgaaggacttcagcatttgggtccttttggcaacatccccaacatcgtggcagagttgactggagacaacattcctaaggactttagtgaggatcaggggtacccagaccctccaaatccctgtcctgttggaaaaacagatgatggatgtctagaaaacacccctgacactgcagagttcagtcgagagttccagttgcaccagcatctctttgatccggaacatgactatccaggcttgggcaagtggaacaagaaactcctttacgagaagatgaagggaggagagagacgaaagcggaggagtgtcaatccatatctacaaggacagagactggataatgttgttgcaaagaagtctgtcccccatttttcagatgaggataaggatccagagtaaagagaagatgctagacg

SEQ ID NO: 8087 - DNA, 915 bp, Homo sapiens
acagtgttcaccaccccagccaacgtttcaactccagagacaaccttgaagcctagcctgtcacctggaaatgtttcagacctttcaaccactagcactagccttgcaacatctcccactaaaccctatacatcatcttctcctatcctaagtgacatcaaggcagaaatcaaatgttcaggcatcagagaagtgaaattgactcagggcatctgcctggagcaaaataagacctccagctgtgcggagtttaagaaggacaggggagagggcctggcccgagtgctgtgtggggaggagcaggctgatgctgatgctggggcccaggtatgctccctgctccttgcccagtctgaggtgaggcctcagtgtctactgctggtcttggccaacagaacagaaatttccagcaaactccaacttatgaaaaagcaccaatctgacctgaaaaagctggggatcctagatttcactgagcaagatgttgcaagccaccagagctattcccaaaagaccctgattgcactggtcacctcgggagccctgctggctgtcttgggcatcactggctatttcctgatgaatcgccgcagctggagccccacaggagaaaggctggatgctgcttctcttcctaaagcccccatcgaagaggcttccagccaccattcaatcattcatcaagtcttatgatgtgccagacactgcgcgaaatgtgccagaacatctgttatgtgccagacactgttcttgagactggggatacagcaaacactcatgaagcttataattctagcagaagaggacagtaaacaatgtcatctcagtaagtatatacatgtgttttcaggattgagagctatgaaaaacataaaatatattgagaataatggttggtattttacatatggtggt

SEQ ID NO: 8088 - DNA, 693 bp, Homo sapiens
tcagaaactgttagttggcaaaggatgtaccatctcctattaaacgggcaaggacaagttcccttttctgagagtgctgatggcagagattggtgaggatttggataaatctgatgtgtcctcattaattttcctcatgaaggattacatgggccgaggcaagataagcaaggagaagagtttcttggaccttgtggttgagttggagaaactaaatctggttgccccagatcaactggatttattagaaaaatgcctaaagaacatccacagaatagacctgaagacaaaaatccagaagtacaagcagtctgttcaaggagcagggacaagttacaggaatgttctccaagcagcaatccaaaagagtctcaaggatccttcaaataacttcagggtgagtctggagaaaacatatggaatcccagcatgaaaccgtttcagagttctaataaaaatatgcatattctcacagcatgtactttatttaatatctgaaaaaattgtgatagaaatgtgtatttgttttaaaaacgtgtaacttcttatatttcaaagctaatacatgttcattgagatatttggagactatagagaaagataaaagaaaataaatcacctatattccactatccaaagacaaccactgttagtattttggtatatttccttctagactcttttttatgtggg

SEQ ID NO: 8089 - DNA, 631 bp, Homo sapiens
gattcagaagtcgataagaccaggagaagtgaagatgtaacatgttatctgtcgctcctcttagctggcggagagaatttacatttaaagattagcagagtgagaaagagaaatctgccttttgttgtgtggggtgaggaggaggcatctacccctggccttgacgctatctcccatcacctctgctatccagacaggactcaccgagaaaagattgatctctgggctggtgaacataatctctgtcccagtcagaaaaggagagaggaaattagcagagcgattggtggagaatgatatctgtcaaaagaaacacttggagagcactgagtttagtaataggtgactgccggaaaaaagggaactttgaatattgtcaaggcgcacgcgcccagcaccctgcctccggcgatgccgccccagcccctctgatggccctcctctctgctgccactcattccagaacaggaggcatgagcccggaacgcgcttgcttttaggagacagccactttctgtgtggtacgctggattcaaggatgcctgataaaccccacttgaaaaactgaggtgcttaaggagtaaaataatatgttcctggtggcatcctccagatcgtactgagaagcact

SEQ ID NO: 8090 - DNA, 563 bp, Homo sapiens
tgaaggtacagccacacccagcccgttgctggccccacccagcatcttccttgcctaagatgcccctgtagggcatccccgatctgctccagccccatcctctaacggggagagggccagagctggcctcttttttgaagtctgcggtctggggtggagaaggcagtaacatagctcctatctggcagtgtggtgggaccagccctcaccttccgcatccggcacaatgagcagaacctgtctttggctgatgtgacccaacaagcagggctggtgaagtctgaactggaagcacagacagggctccaaatcttgcagacaggagtgggacagagggaggaggcagctgcagtccttccccaaactgcgcacagcacctcacccatgcgctcagtgctgctcactctggtggccctggcaggtgtggctgggctgctggtggctctggctgtggctctgtgtgtgcggcagcatgcgcggcagcaagacaaggagcgcctggcagccctggggcctgagggggcccatggtgacactacctttgagtaccaggacctgtgccg

SEQ ID NO: 8091 - DNA, 759 bp, Homo sapiens
agatgagaatcccaagcagcacattcccctggaggagtacgctgcgaacctaaagagcatggtgcagtacctgaagtccgtggacatccctgagaatcgagtcattctcatcacgccgaccccactttgtgaaacagcctgggaagaacagtgcatcatacaaggttgcaaactaaatcgcctgaactctgttgttggtgaatatgccaatgcgtgtttacaagtggcccaagactgtgggactgacgtacttgacctgtggaccctgatgcaggacagccaggacttctcatcttatttatcagatggactacatttgtctccaaaggggaatgaatttttgttctcgcatctctggcctttgatagagaaaaaggtctcttctctacctttgctgcttccttactggcgggatgtagcagaagcaaaacctgaattaagtctgctgggagatggagaccattagccaatcacaggagacccaaatctgcttgttatctacagaactcaaagttgtcaatacgtagaggtacgcttttttcctcaggcttaaacctttgccactgatattaataataaaagtattagatgatttttcagggaagttttatacttaggtccattgtgtttcgacagtatttattaatgcagatatcagtgctacagctataaaatataccctgagcagcttgttaattctataaatgacaaagactatgtttttaaaaagtcacaattttataaaaatggtttttctta

SEQ ID NO: 8092 - DNA, 491 bp, Homo sapiens
aagtcgataagaccaggagaagtgaagatgtaacatgttatctgtcgctcctcttagctggcggagagaatttacatttaaagattagcagagtgagaaagagaaatctgccttttgttgtgtggggtgaggaggaggcatctacccctggccttgacgctatctcccatcacctctgctatccagacaggactcaccgagtatcaaatgataagaactgagcacactggatgaaataatacttgcactgggagcactaagaaaagattgatctctgggctggtgaacataatctctgtcccagtcagaaaaggagagaggaaattagcagagcgattggtggagaatgatatctgtcaaaagaaacacttggagagcactgagtttagtaataggtgactgccggaaaaaagggaactttgaatattgtcaagatcgtactgagaagcactccacaatgccagactcacctgtggatgtgaagacgcaat

SEQ ID NO: 8093 - DNA, 5989 bp, Homo sapiens
ttcacagctgtagcacaaacagatttgaaggagccgctgaaagttcttggcattactgacatgtttgattcatcaaaggcaaattttgcaaaaataacaagtatgttcaatttaaaatgtatttgtatacttgaagaaagtgttacaaactgagactgatttgtgcagagaaaaaggatcagaattaggaatgtgttgccctgaaactgtacaaggtttcatttgatacattgccaaattatgctattggccttcgtttatttattgaccttcatttatttattttttccttttatctttttatttcaatagtttttgggatacaagtggtttttggttacatggatcagtttatatagcgatgaagtctgagattttagtacacccctcccccgagtagtatacgttgtactcaatatgtattaatagatttttagctcctcaccaacccaccctcctccttctgagtctccataatccattataccactccgtatgcctttgcatacccgtagcttatctcccacttacaagcgagaacatacagtatttggttttccattcttgagttacttcatttagaataatggcctccagctccattcaagttgctgcaaaagatattatttcattctttttatgactgagtagtattccatgatgtgtacatacctcattttctttatctagtcattgctcttgaccttcatttaaatcagcgtccccacattttgcacgtacatttcatgggaagccccagtgactacctaaaggagtatttcatgtattgcttttatgaatattggctctgacttaggtgttgtcgctctgttttcaaatgccaactttttccttttgcttgaaaaaaagtcaagactgcagtcattcactgtacccagatatgtattttggcatttcatgctcattaatatgaaacgatataaattcaaatgaatctgattaaaactttcctttgccaaagcaattaaggcatgcttttcatttgccagcagtatatgtacctttttctagagttatgtttgaatggtcagtcctttgttctttaaatttagaacatagcaatctttccaaggaaaagccatggcttgaacattatttgcactccagtttgcaaataactttgagtggtaagaaattagctcattaccagcttcagttgcatgctagtaaacacctagtacctgttctggggacaaacatgactcccctggtgaacctgcagctccatggatattctgatagccgttcatccctcatgactcaaactcaggcctccagcccagcagcattagcatcacccaggagcttgtttgaaatgcacaatcttgggtgtaacccagacccactgaaccagaatccattttaacacagtccctcagcccagcaaagactgagaagcaccattttcatctgcacttttcccttcaaggttgttcatggtagctgaaatactaaatggggggtgttcacaggaagaaccaggtgccccagattctcctggaaagtcctctttaacactgcatgtgacttgggccctataaatgtgcatctcagtcacaatttggtcatattagagctgggcattggtgcagatagttcacaagcagatgacacaaaaagcacattttccctttgcatccagacctatgtcccatccagactaatatcaacttaagtttttcattctctgtgaaagctacacccagtgggtgttgctggaatggtcagaatttgctgagaagtaaagtgagttcaccagaatgtccctgaggcacaactgcatttacacatcggcccttccaggaaaatctaaactcttctcttgttcgacactcttctcttactagcatgcccatgagatgagtggctgttgtgaagagccaggacttactctgccactaactagccgtatgattgcagggaacattacttaacgttctaggcctcagtttccccatctgtaaatgctgtctgaaatcccttctgcatctgcattctgtaactgaaaaataatcttgttgccttgctgcttccagaaaaccgggcttcctttttaaagctctgctcttttcatttttaaaaaacaattctagtgatcagaattgaattgatagaggcactaaatcatttgagggcctgggcccttctccagaagtgagtatcacagttcacttagcagggactgaaattcacaagtaacagctgtctgcagccttcaacaccaggactgtcagaggtcatgtcttctgacactttaaaaattggaatttgccatggctttgagctttgaggttacttccccaaccaaccaatggcctgcctatcaaacaaatgctgatactgttttattttctggaagcagggtcagaaaacctccatgtttctcatatcttgcaaaaagcaaaaattgaagtcagtgaagatggaaccaaagcttcagcagcaacaagtaagcactgggtcacgtggcagggcttcctctagcaggggagcaaacacattcctgtatactcattggttgagcaaatatgtaatgcaccctctttccagccaggcagtgtgtgtgggttaaccctcaggagacagcagtgagtacagacagactgaagacctgtaaccacaaagctcagaatctgtttcattaaagaaaagcatttcagtgagagaaattcctctaggacaggagtcagcaaacttctataaagagccaggtagtatgtatttcagatttgtgtgtcataccatctccattacagcttcttagctctttcactgtagcatgaaaacagcaatcaacaatacaagtaaacagatgtggctgtgttccaataaaactttatttataaaaacaggatttgtcctggtagacttgccttgaggaaaatagtttgctgacccctgctctcaggaggataaaacatgttctggcttcttactggcaaaaaagaccaatcttcagatttgaacataaaataaacaacaagtacttaaaggaaaataggcaatcaggtctatccaggataaaccgaagaattcgccagcatctgttgaattgcggcaggattgctgtacagccttccttgataattagaacatccacatctgcttcctcctcagtggtttacataatgaaggagaaaacagaacaatcgtaagtcagttttttcacccctcattatccgtaggaaaatagatgaatagatttggccaactctgtgagcccataaagtgaaaatcttagctacacttgcagctgggtcaaatatctctggtcattgaaacataccagttatactcacaatagatgtgttattgcctttctcgaataaacgttttaaaaattcctttaaagaagcatttaaaacaaagaccctgaaataagagggttggaaattttaagatgctttttgtcttttctaggtaattttaagtaacatctaaaagttattgaccagttttgctgagtgtaactatcaggaccagctacatagtttgtggggtcctgtgccaaatgaaaatatggagccccttgttcaaaatgtataagaatttcaagatagcaacagcagagtattaaacccagtgcagggccccatgtaaccgcccaggtcctcctgtcttagtccgcctgggctgccatgacaaaataccgttgactgagtggtttaaacaacagaactcacacttctggaggctgcgagttcaagatcaaggtgttggtgttggcaggtttgtttctcctgagatctctggatctccggaggtcgccccctccctgtgtcctcacatggtcttttctccatgtgacacatccctggtgtctctcccacttcaaataagggcaacggtcctattagaatagaaccctacttaaccttcattacctcctcaaaggcattatctccaaatacagttacgttaggggtttggggcttcagcatatgaatttggggggagacacatttcagtccataacacctgctatttaatatttgtttttaataaccctgggtaaaagggcttgccccagcataactgcagctgtttcctttataacatcaagcccaagtgttcaatacttcatggggtttgagcaagaggactgagctattgcaacaggcatgtggtagtaatgccacacacctaccctcccgtgaggccctggttcaggcttattaaatggaaacaagcctggcagacgaggaatggccaagacccatgaggctaaagaagtttgctttccaagtcagatgcctacacctggtgagtggaacagcagtataaggtagtaggtcccggatgagtggtctacattccagtgcagaggaaacctaaataatgtgccaaaggagaaggcacagacacaaaagctaagaattggactgggcctttatatacagaaaagatttagagaagctaaacaggaccaggggtcgggcgcggtggctcatgcctgtaatgcccgcactttgggaggctgaggcaggtggatcacttgaggtcaggagttcaaaaccagcgtgaccaacatagtgaaaccctgtctctaaaaatacaaaaattagccaggcgtggtggtgcatgcctgtaatcccagctactcaggaggctgaggcaggagaatcgcttgaacccgggaggcaaaggttgcagtgagccaagatcgcgccactgcactccagcctgggtgacagagtgagactccatccccaaaaaaaaggactgggggctttatcagcaaagcagatggtgtgaataaaaaatagctaataacaataaatatgcattagatgtgtttagtggcaaacactgttctaagagctataatatatcttatgtcatttaattatgtcatttaattctcatcaaaactctatgaggagtaagtatgtttatcagagatggtgcttgtgtagaagacatgagagagtaatgtaaagggcctggcccaaggtaggcttagtaaatggtgaccattgagcctgttgtaacatggccagcctatggaacaagcatgaagtgtgtcttcagacaccagcctctgagggtccatgaagctagctaacttgctggccttatgcttacatggtctcatgtaatgtgcacaacacattttccttttcttcccgtagctgcaattctcattgcaagatcatcgcctccctggtttatagtagacagaccttttctgtttttcatccgacataatcctacaggtgctgtgttattcatggggcagataaacaaaccctgaagagtatacaaaagaaaccatgcaaagcaacgactactttgctacgaagaaagactcctttcctgcatctttcatagttctgttaaatatttttgtacatcgcttctttttcaaaactagttcttaggaacagactcgatgcaagtgtttctgttctgggaggtattggagggaaaaaacaagcaggatggctggaacactgtactgaggaatgaatagaaaggcttccagatgtctaaaagattctttaaactactgaactgttacctaggttaacaaccctgttgagtatttgctgtttgtccagttcaggaatttttgttttgttttgtctatatgtgcggcttttcagaagaaatttaatcagtgtgacagaaaaaaaaatgttttatggtagcttttactttttatgaaaaaaaaattatttgccttttaaattcttttcccccatccccctccaaagtcttgatagcaagcgttattttggtggtagaaacggtgaaatctctagcctctttgtgtttttgttgttgttgttgttgttgttttatataatgcatgtattcactaaaataaaatttaaaaaactcctgtcttgctagacaaggttgctgttgtgcagtgtgcctgtcactactggtctgtactccttggatttgcatttttgtattttgtacaaagtaaaaataaactgttatgagtagtaaaaataaa

SEQ ID NO: 8094 - DNA, 1780 bp, Homo sapiens
aaagatggccgggaactcgatcctgctggctgctgtctctattctctcggcctgtcagcaaagttattttgctttgcaagttggaaaggcaagattaaaatacaaagttacgcccccagcagtcactgggtcaccagagtttgagagagtatttcgggcacaacaaaactgtgtggagttttatcctatattcataattacattgtggatggctgggtggtatttcaaccaagtttttgctacttgtctgggtctggtgtacatatatggccgtcacctatacttctggggatattcagaagctgctaaaaaacggatcaccggtttccgactgagtctggggattttggccttgttgaccctcctaggtgccctgggaattgcaaacagctttctggatgaatatctggacctcaatattgccaagaaactgaggcggcaattctaactttttctcttccctttaatacttgcagaagctgttcccaccatgaagttattggtttcttgaactctttggggcacaatttcaagaggaagaagtaaaaaaaggataccatttcaaggaattgcccagggacaagtgcgaagagaatattctttctcttggctgaggaaggttctcttgtgatcctgggaaatgctagaccgtgagcatcttgatggaggatgtgaactgccacttcctcacaggcagcaggcaggtgctgaataagtgcttgctgaatgaatgaatgaatcacgccaaggggcatgttacctgttccgccaaaatctgctgctgctgctgctgctgctgctgcctttgctcccgcaggaactgttgcttctgctgctctatcaactgggcccgctgatcaatgagcatctgcttcatgatggctgcttggggctggctgcccaggaagccggggcctgcgggactggctcctgagaccatgccacctgagcctgggggcacggaggactgcatggggcctgtggttcggggaagtccaactggatgctgctcctgggaagacaagagagagggagatgcagggattccccatagagactcactgctgtttgaagggaagcccctggaaaaagggaacggggcagaagtcccagcttatggactggagggtttttgagtggcacgcattgcatttccataaacgtagcttcaaacccgaccttacctgagtagaatgagagaggccacaagggacagtaagagagcatggctctgggaagtccaaggccaagtccagtctgtttcggatgggactgactattgcatatagactggattttcaactaacatcctgtgttcctccaaggaaagggaataagccctcaggctgagctcacctaaagtctggaacacgagacacatcctgacctcacctgttaatccttatttcttactgtctacttggccaaaatggacgtcttctttgcaagtaggagggacatttgcagaaaactgcaggaatttgttaatcaacagatctgatatttgatggaattctaacgagttgcaacatttgagagcttagatatatgtcagaaagaaaaatcctcctggccagagttgttgatggtgagaactgggaatgttttacaccgatcaaagctatgtaatctcctaatatttttaaaaatagaattgagtcggccgggcgcggtgtctcacgcctgtaatcccagtactttgggaggcccagtactttgggtggatcacgaggtcagttcgagaccagcttggccaagatggtgaaaccctgtctctact

SEQ ID NO: 8095 - DNA, 481 bp, Homo sapiens
ctctacatcttctccaccgtcagcaagatggggcttgaggccaccatcgccatgctgctgctcagcggagccctggtcagtgggccctacacactcatcaccaccgccgtctccgccgacctggggactcataaaagtctgaaaggcaacgcgcacgccctctccaccgtgacggccatcattgacgggacgggctctgtaggagcagccctgggccccctgctggctgggctcctctccccgtccggctggagcaatgtgttttacatgctgatgtttgcagatgcctgtgccttactggaaattctaaaactcaacttccccaccacatacaaaatcaaataccgactctcaacctatgaacttactaggtttaaatggctgttctttggatcatctgtgggttcttttaatgcctgaatgttctaatgaagcctccagatggatttccactaagtagcagtaaaattcctgtcattac

SEQ ID NO: 8096 - DNA, 1733 bp, Homo sapiens
atcaagtactcaagaaaacagaaacctcacataggctgagcaagataatttgcatcaagggagtactctaaaaatggaaactttgtttaaaactagataaataagttttcaaaaacttgcaaactttgccctggttttaataaatctaacatagggttaaaattgctgttgttttttaaaaaaaatctgaagtaatctctatactagacaagttcagatagaaggtgaaaccctggctcttcaggttcaagacactccaggtattcaggtccatgagaacagcctgagctgcagtgaacagctgaataggtgcattcgctgggcagatgctgtggtgatcgttttctccatcactgactacaagagctatgaactcatcagccagctccaccagcacgtgcagcagctacacctgggcacccggctgcctgtggtggtcgtggccaacaaagctgacctgttgcacatcaaacaggttgaccctcagcttggactgcagctagccagcatgctaggctgctcattctatgaagtgtctgtcagtgaaaattataatgatgtctacagcgccttccacgtcctctgtaaagaggtcagtcacaaacagcagcctagcagtacacccgagaagcgaagaacctccctcattcccaggcccaagtcacccaacatgcaggacctgaagaggaggtttaagcaagccctctctgccaaagtgaggactgtcacctccgtctgaagcaggaggagcactcaagggggtttggtcttcccaggaagagggcctgaggttctcctagtgcaggaacgttgaatattggcaatgattcctggttccagaaagggctggagcagaagggccaagagggcctgtggaactgctacagaaaaggaagtgttgttctgagcagggggacaggattgatgaggcttgaaagagcccactgagccactctctgaatatgtgaaatgtactctgtgtcttttcctttagagtggggagggggcataatcgtttcggtttctgcattcaactaccttgtaaatggtggtccgttgcagtttcaccaaatgtattgatgtgatttacagtgggaatgaaagaacagattaagcattgataggctttcttttttcccccttttttcttttttctcttttcttctttcttttcctctttttccccaagaggaagaattgcttttctcttaccagtatgatttgtaactctggaacactattcttacagaatgcctttctaacctgaaggatacccagatttctttctttatgtacaagatggaaaatcccctacccctcaaaaacaggttgagtttatgggccagaatattttgtataccagacattggtaagctctcatggtttacaggaaggctctggttccccctcacaggatgagcatgctcagttgggcgtgtgtggaggagctgtgaacttcacgctcttcaaccccagactttgactgtatagttttttgtttttttaactgttccatcaggaaaaaaatgtgtcagttgattttggtgtgacttgtgtaaatggttcatggcaatgacgttgggttgcttcctaggcctggctgagttgtgcctaagggtggctgaaatactaaaacacttatcttacagcaagtgaacaggggctacctgccacatcccctccacagatgcactttaaaaagccactcatgctttggcttaaactgtaattaa

SEQ ID NO: 8097 - DNA, 573 bp, Homo sapiens
ttaactatgaagaagagtgacaggttttctcttttacaggacaaccccagcaatgtggagaagcctggggcttgccctggctctctgtctcctcccatcgggaggaacagagagccaggaccaaagctccttatgtaagcaacccccagcctggagcataagagatcaagatccaatgctaaactccaatggttcagtgactgtggttgctcttcttcaagccagctgatacctgtgcatactgcaggcatctaaattagaagacctgcgagtaaaactgaagaaagaaggatattctaatatttcttatattgttgttaatcatcaaggaatctcttctcgattaaaatacacacatcttaagaataaggtttcagagcatattcctgtttatcaacaagaagaaaaccaaacagatgtctggactcttttaaatggaagcaaagatgacttcctcatatatgatagatgtggccgtcttgtatatcatcttggtttgcctttttccttcctaactttcccatatgtagaagaagccattaagattgcttactgtgaaaagaaatgtggaaa

SEQ ID NO: 8098 - DNA, 716 bp, Homo sapiens
gtgagcccccagaaacaagaaacacacatgaacacggtgatgtctgatatttttctttggccctggaaggtggtgggagtgaaggacgatcggatgggggaagagatttgtgcctgcattcggctgaaggacggggaggagaccacggtggaggagataaaagctttctgcaaagggaaggtgggagcctccgctcaacctagctgatgctgctctgttctttgctcacccactcctctgccaaccagcccagggtggggattgctctgcccttgacgaagctgactcctggccaggccagcccctggtcccctacccatacccctgtgagcttgcgcagcctcacgccttacctccctccctctggtctgcagatctctcacttcaagattccgaagtacatcgtgtttgtcacaaactaccccctcaccatttcaggaaagatccagaaattcaaacttcgagagcagatggaacgacatctaaatctgtgaataaagcagcaggcctgtcctggccggttggcttgactctctcctgtcagaatgcaacctggctttatgcacctagatgtccccagcacccagttctgagccaggcacatcaaatgtcaaggaattgactgaacgaactaagagctcctggatgggtccgggaactcgcctgggcacaaggtgccaaaaggcaggcagcctgcccaggccctccctcctgtc

SEQ ID NO: 8099 - DNA, 3314 bp, Homo sapiens
actaatgactggcaagcgatcctatgcagctccaggactcaggctttcccccaactctccactcaccaccccttacattgggcataggaggcctcctccggccccaggctgagggcctaagggagccattgagaaccttggccagggctaagcaggccagtgctcaccagcaccgctgccatcccgcgcgctcctgctctccagtgggattctgcccttaaggctccgccagggtcggggcggggccggttgggaggccccgcccccagcccgcccccggcccggggtgcgaatccggtgccggcaagcggctggcgatgctggaggttcgctagccgaagcggctgcatctggcgccgcgtctgccccgcgtgctcggagcggattctgcccgccgtccccggagccctcggcgccccgctgagcccgcgatcacttcctccctgtgaccaaccggcgctgcaggttagagcctggcaatgccgtttgggtgtgtgactctgggcgacaagaagaactataaccagccatcggaggtgactgacagatatgatttgggacaggtcatcaagactgaggagttttgtgaaatcttccgggccaaggacaagacgacaggcaagctgcacacctgcaagaagttccagaagcgggacggccgcaaggtgcggaaagctgccaagaacgagataggcatcctcaagatggtgaagcatcccaacatcctacagctggtggatgtgtttgtgacccgcaaggagtactttatcttcctggagctggccacggggagggaggtgtttgactggatcctggaccagggctactactcggagcgagacacaagcaacgtggtacggcaagtcctggaggccgtggcctatttgcactcactcaagatcgtgcacaggaatctcaagctggagaacctggtttactacaaccggctgaagaactcgaagattgtcatcagtgacttccatctggctaagctagaaaatggcctcatcaaggagccctgtgggacccccgagtatctggccccagaggtggtaggccggcagcggtatggacgccctgtggactgctgggccattggagtcatcatgtacatcctgctttcaggcaatccacctttctatgaggaggtggaagaagatgattatgagaaccatgataagaatctcttccgcaagatcctggctggtgactatgagtttgactctccatattgggatgatatttcgcaggcagccaaagacctggtcacaaggctgatggaggtggagcaagaccagcggatcactgcagaagaggccatctcccatgagtggatttctggcaatgctgcttctgataagaacatcaaggatggtgtctgtgcccagattgaaaagaactttgccagggccaagtggaagaaggctgtccgagtgaccaccctcatgaaacggctccgggcaccagagcagtccagcacggctgcagcccagtcggcctcagccacagacactgccacccccggggctgcaggtggggccacagctgcagctgcgagtggagctacctcagcccctgagggtgatgctgctcgtgctgcaaagagtgataatgtggcccccgcagaccgtagtgccaccccagccacagatggaagtgccaccccagccactgatggcagtgtcaccccagccaccgatggaagcatcactccagccactgatgggagtgtcaccccagccactgacaggagcgctactccagccactgatgggagagccacaccagccacagaagagagcactgtgcccaccacccaaagcagtgccatgctggccaccaaggcagctgccacccctgagccggctatggcccagccggacagcacagccccagagggcgccacaggccaggctccaccctctagtaaaggggaagaggctgctggttatgcccaggagtctcaaagggaggaggccagctgagtaggcagcctggtgagggggggcaggggatgggcaggagggtgggagagtggatgaggggcttctcactgtacatagagtcactggcatgatgccctcgctcccccatgcccccacatcccagtggggcataactaggggtcacgggagagcagtctcgtctcctgtgtgtatgtgtgtgagtggtgggcaggccagtggcagggccggccccagcccctgcatggattccttgtggcttttctgtcttttgctagcttcaccagtttctgttccttgtgggatgctgctctagggatactcagggggctcctgctctccttccccttcccttcttgcctcaccattcccctaggcaggccctgcaggtcccacactctcccaggccctaaacttgggcggccttgccctgagagctggtcctccagcgaggccctgtcagcggtcttaggctcctgcacatgaaggtgtgtgcctgtggtgtgtgggctgctctaggagcagatacaggctggtatagaggatgcagaaaggtagggcagtatgtttaagtccagacttggcacatggctagggatactgctcactagctgtggaggtcctcaggagtggagagaatgagtaggagggcagaagcttccatttttgtccttcctaagaccctgttatttgtgttatttcctgcctttccgagtcctgcagtgggctgccctgtaccctgaacctcatgagcctctaagggaaaggaggaacaattaggacgtggcaatgagacctggcagggcagagtacaagcccagcacccagtgtcccagccttactgggtccttaccctgggccaaacagggagggctgatacctccttgctcttcctagatgcccacctcctacaatctcagcccacaagtcctctccaccctagggggcttgctgcatggcaataactcataatctgatttggaggtttgccctttacaggggcagattttctgctcagttcaacaatgaaatgaagaggaactccctctttctacagctcacttctatcagaggcccaggtgcctcagagccacattgagttgctttttctgggatgaggaagtagggttaaactccccagtttcctgagggaggctcctgacaggtgccctttgtcagaccctaccacagcctggataggcagccacattggtcctcgcccttgctcggcactccgtggtggtcctgcccttctccctgcatgcctgtgggtctgctctggtgtgtgaaggtcggtgggttaactgtgtgcctactgaacctggcaaataaacatcaccctgcaaagcc

SEQ ID NO: 8100 - DNA, 1784 bp, Homo sapiens
attagaaacaaattttggtcggtgctccctgggctgctggtcttctttaccttccagctgctcacagaacagagagtttctacatacaagcagaagatgtgaaaatattgggaataaataaagtatatgcttataaacaagttgtggctgctcctggttacgttgtgcctgaccgaggaactggcagcagcgggagagaagtcttatggaaagccatgtgggggccaggactgcagtgggagctgtcagtgttttcctgagaaaggagcgagacacaacttgcagctactgaatgatatggctggccggctctaccatttcagtgaggttctgcctaatctcttttgattctaaggggtaatgtggctcagccacagcaaggaggctgagttctgatgttctctttccccatacttctatggaagactggaagacagattacttgcagtgatttctggaggcagaagataagcaagtggcctctatgatggtagaaccaagaaagaatgatcattgcccttaagccttcagagatgacagctaaatccagagggaaaataaatagggataagattgtaaaaaaagttgctgctggagaaaaaatagctgctgctgataaagaacctcaataaattcaaacaatgtctgcgtttggccctcaaatgtcatgctggctcattgctcgggagaaagagccgtacaactaccatgtcagaggagatgaggaagcaaagaagtctgactaagggcactgccatggatattcttgcccctgctttggaacaatctatcattggattgtggagaggaagcaaggaggcagctggcagtgtgacaccacgtgctatgactcatgactgttttgcctgatggttggcaacatagtattggcacagttgtgggctctagagtacctgggcctgaatctctattgatatgtgccatttggcaaatttctaaactctaagtcttagctgtctcatatacaaaatgggcataatacatcctccctcatatggttgttgtgaggattaataaaacagtgtttataaagtgcttggcacagtgctgaacacatagcagtaaataaatattagtcattattaatattagctgatgcacatttgggggcaatttcaagaaagaattgattacaatagtaaattcagactatggcatctattgattgttcctttttaaatgaaccattttaaatacagtaaaagccctcctccctggcctctgcttaacttcctttatggagtaagtcgatgtttttccttcctattggaatatacactggccaatgctcagggcacaatggaagctcatgggcaggtaagttacttctggtgaacacttatatttctgcttccacacaacaagttgatcacttaccaaaagttagctgtgtttttgccaagcccatttatggcagttgtactcgttattacaagtaggtaatttaatgtaaatttgtgaaatatgagtataaaaagaaaactattattttcatgaaaactaagttcaatgctttggaaagacttactaaagaaaagttgcttttgaaaactgccatattgttaaaaataaaacaaaactgaaagtggaaatcaaatgtgatgcattaggaatgtaacttacgtgaaaaagagtctgtgaaatcccagggtgtggcctcacgctcaaagaaaaggccttggccttacaacacatcaccagagtggtgaatgaatgtacctttgtgtgttttaggttgaaataaaatgttttatgtatgtata

SEQ ID NO: 8101 - DNA, 933 bp, Homo sapiens
ccggacgcccggcccgctcgcgggacggaggcggcgatggtgactgggcagcggcgcggggccggggcctgggcagggcggctcggccgcctctttctctcgctgcccccgcccctcctcctcctccctctccccgagtgctagcccgggcggccgccgagcttggcgctctctcgcctcgctgcctcctcccccgcgccgcggaccctctcccctcccttgcgttgcccccctctcccgccgcctcctcccgctctcctctcgctctcctcccgcctccttcttccaggcgcggccagcgggggcaagagcgaggtggctgcgaggaggcgtcactgaaagccctgacttggggaaggctgcgggctcggagccggagacgccgagctggggccgggtgagttgggaatcagactcttgagttgacagctggcctatggtttctgcattttgttaagaagcacctcatgcaagcgagggacctgggactgctcacagccaggtggcatttttctgaagttgttcattaagacttcccagcattcctacagatataaataggtgaggccgcaggcggtgctctgggtccgggagcgctgtccccagcatgaacgcggccggcggcgggagtgaatgactgcagctgcgacttccttcccgggccgcccgagcctccttccccaccgactttcttgttttgattaactccgtggactcctgactctttcttcgcccggaacatcaatatgtgtcatgtcattgtcacctgtcgctcgatgctctggaccttgctgagtattgtggtggcttttgccgagctcattgccttcatgagtgcagactggctgatcgggaaagcgaggagccgcggcggcgtggagccggcgggcccgggcgggggctccccggagccctaccaccccaccctgggca

SEQ ID NO: 8102 - DNA, 558 bp, Homo sapiens
gtgaatcactgaagtgatttgagacagatatcaggatactcatggcaatactaggactatgattttgacagtagctttttaaattggttctggatatcttacatttgaatggcgtacatttgtttgattatttttcttaaactttttaggtatttcagtgaaaattacactagtgaagctcatcagattctttcccgttcaaatcatccaaaattagggtattcttatgcaatagttggaatcaatcttacagagatggcttatagcttactgaagagtgaagctttgaagtttcatctctataaccttgttcctggtataccaacaatggaacactttcatcagttttactgttatcttgtctatgaatttgacaagttttggtttgaagaagaaccagaaagcattatgtatttcaatttgtatagagagaagtttcatgaaaagattaaaggacttttactggattgtaatgtagcacttactttaaaagtataaatcatccactgtatcttctatttctaccacattttgcacattcaacagaatttatatgtt

SEQ ID NO: 8103 - DNA, 3934 bp, Homo sapiens
taattacagatctacctttagcacagaagtagccatagacactatgcagatgtgtgagttggctgtgttccagttcaactttatttgcaaatacaggtagcaagccagatttggcccaagagccctggtttgccaaccctgctttatggtgaggtaaggtctatggggcgttatttttgctcctccttccacctttcgttttatacttctgggtgttttgaaattaaagtgagatgaatgtggccattccagtagtctacagtttgaccttgacatactgaagtcaaacaatttttttttttatattttcctaagttacattcttgttaggtagcctttcccctttttgagacagatgtaagaagaaaatgttttttactttataagctcttacttcagaagagggtaatgagttttatactgtaaacacttcagttggaacttaaaagatattgagatatattcctttttaatcaggcaaaactggaattgaaatttatttgggtagctaatcagaaaactaatcaatcaaatgtttttttcctttttttttttgagtgcaaagctgagacccgactctttatttggatgggctgttcctttaccttatcatacgttaattgatgtaatgccaggtcaagaaacagcattttcagttaaatgaaatactgtgctgctgttaataatgagtcctctgcagatgtatggcgatgtctttgtgaactataatgaaatgtgagaagaatgtagtcttcatatgattagaactgtctaggaatgtgtttgatacaatcataaggataaattgccttagactttttacctactgttaatgggaagagattttggcctgaatttttattgtcttcaggaaatttctgttttatcttaaggttggttaaatatataaacaacgattcagtaggaatttttaaaatccctaatggacttcaatatgaaaagaaagtaaagaatgtttttttctaagccttaagccaatacttagcacatttcataccattttagcagcacttgtcagaaagaaaattttaaaaatatagtggattttgtttggttgccagaatgcacacttaaacttgttctgcaattttctcttcatttgatccccaaatgaacctctggaaggtagcctattcttaagtttcctcctgcactttaaaatcaccctgcttgcacctcttcacgtaggtctttgaggagatgtgcaccttgtctttgccaaggtgtgcctctggcttcctccccgatggtttccacagctttccttctccttgcagcaggcgtttccacttaatagctgccctgtcagcatctctctagagatcccatcccaaatctgtaaaccttcttggctttttttttttatgaagataaaatatgtaacaataagacactagaccatatagtagttatccagtaaatcatagctgtcatcgttgttgctattttagaaatcctacattttatcgtcttgcatggtccgctcctttttgactaccaacttgcccatgtgttttctcctaaaacacgttgctcaagttgcttgtccctggagccctggcattttctcctcctcaccattgttctcatacctctaccatgggaaccttggcagcctgctttctggccccatcttgccaaatgcccatgtagctaccacaccgcggctttttcttgatctctgtcctctaccccattgtcattctggacaaggcagtctcccgattttccttgtcctatttgatgatacgttttatatttgcttctctgactttgagtcctcttgttagcccctaaatgtttgtactccccaaggttctgctggtgatctcctttcctctccccctccaccctttctattgatctcacctccttctcaggcttcagagagccgtctgtgcaggtgactatgaaatgtgtatttctcatccacctgctttgagcttaagatttacatctggagaggtcaacctaggggagccatggcatctgagactcagcgtgtcttaaaccagattcatctcttactgtcctcaccagcttctccagctctccttttagctgtagtgacagttgcactctctcagccaccagattgtggtgcccttcttcgccacatcttgccttcattctccacattgcattcgttgcagttttcaggcttatccttataaagtatcttttcttccaaaaattgcttgtgtatacatatgcatagagagatatctggaaagaaattcaccagaaagtttaattcaccatccagtctatctctgggtaatgggattctatattgttcaagcttttttttttttttttttaaataacaggccttgattactcatggacttgtgcccagtgtatacccgtctatctcctcagcactcccttgccctgaaccccatcactggggctcagttgctggttcattcattctttgtacctccggtcatcattttccgggtgcctttcaagtaaactttccttagtgaaacccttcttccagctgaatgtttcttcctttcgtgagccctctggtctctatgctatttcctgtattctgccctctgctctccatacatgtgtattttgtgttctgtcctttattagattgtaagctccatgagggcagagtttgggtctgattacccatcctttcccccttttggttacagtctcccagtttttctttgggagacaacaccttttccccctggctacagttttggtgggatgggcagttcaggtgtcctgccaacgagatactcttctcctggaatttgaattttgagtcatgggatacaaggactgacagtgattggcactgattcagcctggccgaggtgctctgaagaagccactcattagttcctgcctcccagatccctggagctgccctggtccctgaactctccgaagcctggttcttcagatattcctcgtatctgtgagctatctcatatccttacaataaattctctctctcttttattttaagttaaccaaaaccagcttctgttgcttttacccagcgattcctaccagtagagctgttatgattggaactgagcagacttaatcattctagctcttatattaattctgatgcttttttttcttttctttaaaaacacaaacaaaaacagccagagactgctgctactttgaaacgtacgatagaggccctgatggacagaggagcaatagtgagggacttggaaaacctgggtgaacgagcgcttccttataggatctctgcccacagtcagcagcacaacagaggcgggtatttcttggtggatttttatgcacccaccgcagctgttgaaagcatggtggagcacttgtctcgagatatagatgtgattagagggaatattgtcaaacaccctctgacccaggaactaaaagaatgtgaagggattgtcccagtcccactcgcagaaaaattatattccacaaagaagaggaagaagtgagaagattcgccagattttagccttatatgtaattccttcacatttgggcagcatggacgagaaggaagaatttgcaagtttggcctttatataagcatgtgttgcaggtgctgtttgatttttctaaggtatttttagcccttgatcccctttgcttgcgagaggtggggaactgctcactgacagcttctctgtaacctgcagtaccagtggatcgttcttgattttgttttcattagtgtcatttctttgtcattgaggacttttccccttacaacagtaacaccattttttgaagagcaaaacttataatacctcctgggattgtgagctagtcattcagcctgtgtaaccatgtggaaataaaaattgacgaccaatgtattatatggacaacttttgctttgagtaataaacttgattgtaggaatgtg

SEQ ID NO: 8104 - DNA, 879 bp, Homo sapiens
tggacagccagtgccatggatttcagaacctgcattgccagttgactgcctgctttgtgctacgtgcaggcctgccgcgccctgatgattgctgcctcggtcctgggtctgccggccattttactgctgctgactgttcttccctgcatccggatgggccaggagcccggtgtggctaagtacaggcgggcccagctggctggtgttttgctcattctgctggctctctgcgcccttgttgccaccatctggttccctgtgtgcgcccaccgtgagaccaccatcgtgagctttggctactccctgtatgcaggctggattggtgctgtgctgtgcctcgtgggtggctgtgtcatcctctgctgcgctggagatgcccaggcctttggtgaaaaccgtttctactacactgcgggctctagctccccgactcatgcgaagagtgcccacgtataagagggctgcccggctgcccacagagaagtctcggtctgttgcccaggctggagagcagtggtgcgatctcggctctctgcaacctccgccccttgggttcaagcgattcttgtgcctcagcctcccaagtagctgggactacaggacattcatgctcatgacatcacatgctgagaggacagggaggccagtgtggggctggcctcgaagagaggcggcatcagtgctaccattgagatgtccccacaaaagagtgtgtgacagccagatgtgcagcttaatggagactgaaccaggattgtgggtggaacattggcacatgctgcttatggcttgaatagcagctcttgaggaatctatatttctctacctcatgcagaatcttagagctctggctttgtggctccatggctgggggaggga

SEQ ID NO: 8105 - DNA, 3244 bp, Homo sapiens
cttctccctcctgccgccttatgaacagggtgactgtttccccatcggccatgattttaagtttcctgaggcctccccagtcatgctgaactatactgttcctaagagcatctgccccagtcaacttctcatccacagatattaatctcagtcaacctccagatttttagacatattttgaaagtctttcatcaccagatttcaaaggtgttgatagatatctatttttaaacatggaaagatggtggtgcaatggccagtggctgctacaccccatgtaaaaagcggaaaataaaatgaagattttccagcgcaagatgcggtactggttgcttccaccttttttggcaattgtttatttctgcaccattgtccaaggtcaagtggctccacccacaaggttaagatataatgtaatatctcatgacagtatacagatttcatggaaggctccaagagggaaatttggtggttacaaacttcttgtgactccaacttcaggtggaaaaactaaccagctgaatctgcagaacactgcaactaaagcaattattcaaggccttatgccagaccagaattacacagttcaaattattgcatacaataaagataaagaaagcaagccagctcaaggccaattcagaattaaagatttagaaaaaagaaaggatccaaagcccagagtcaaagttgtggacagaggaaatgggagtagaccatcttcaccagaagaagtgaaatttgtctgtcaaactccagcaattgctgacattgtaatcctggtcgatggttcatggagtattggaagattcaacttcagactggttcggcatttcttggaaaacctggttacagcattcgatgtgggctcagagaagacacgaattggtcttgcacagtatagtggtgaccccagaatagaatggcacttgaatgcatttagcacaaaagatgaagtgattgaagctgtccgaaacctcccatataaaggaggaaatacactaacaggtcttgctttgaactacatttttgaaaatagcttcaaaccagaagcaggatcaaggactggagtatccaaaattggcattttaatcacagatggaaaatcccaagatgacattattccaccatctagaaatcttcgtgagtctggtgtagaactgtttgccataggggtgaaaaacgcggatgtgaatgagctgcaggagatcgcctctgaaccagacagcactcatgtgtacaatgttgccgaattcgatctgatgcacacagttgtggagagtctgaccaggactctctgctctagagtggaagaacaggacagagaaattaaagcctcagcccatgccatcactgggccgcctacggagttgattacttctgaagtcactgccagaagctttatggttaactggactcatgccccaggaaatgtggaaaaatacagagttgtgtattatcctaccaggggtggaaaaccagacgaggtggtggtagatggaactgtatcttccacagtgttgaaaaacttgatgtctttaactgaatatcagatagcagtctttgcaatctatgcccacactgctagtgaaggcctacggggaactgaaactacacttgctttaccgatggcttctgaccttctactgtacgacgtgactgagaacagcatgcgagtcaaatgggatgcagtgcctggggcctcaggttacctgatcctttatgctcctctaacagagggcctggctggggatgaaaaagagatgaaaattggagagacccacacagatattgaattgagtgggttgttgcccaatacagaatacacagtcacagtttatgccatgtttggagaagaggccagtgatcctgttacgggacaagaaacaacatcaccttaattattaagagattcactaactcctacaagatctttattgtcaaagaatcagtatgtattgaattaatgaaagaactgggctttgaggttaggaaacatcatgcttcgtggctatggctgtggctttaagtccaccaagaaacctgagaatctccaatgttggctctaacagtgctcgattaacctgggacccaacttcaagacagatcaatggttatcgaattgtatataacaatgcagatgggactgaaatcaatgaggttgaagtcgatcctattactaccttccctctgaagggcttgacacctctcacagagtatactattgctattttctccatctatgatgaaggacagtcagagcctctgactggagtttttaccaccgaggaagttccagcccagcaatacttagaaattgatgaggtgacgacagacagttttagggtgacctggcatcccctctcagctgatgaagggctacacaaattgatgtggattccagtctatggggggaagactgaggaggttgtcctgaaagaagagcaggactcacatgttattgaaggcctggagcccggtacggagtatgaagtttcactattggccgtacttgatgatggaagcgagagtgaggtggtgactgctgtcgggaccacacttgacagtttttggacagaaccagctacaaccatagtgcctaccacatctgtgacttcagttttccagacgggaatcagaaacctagttgtaggtgatgaaactacttctagcctgcgggtaaaatgggacatttctgacagcgatgtgcagcagtttagggtgacctacatgacagctcaaggggaccctgaggaagaagtcataggaacggtctgtataaattcaactgactagaaactctgcagatgttactaacacagctaataagactgtcttcggagatcaatgcaaactttactgctcttttctcagtgactctgccatctccagaaactaatgttctctgttaatctgactccactactggcttcttagtgacctttataaatccaaaacttgctccatgtacaacttgctccaagttaataacctctgaacattgtttcaaatattgcttctcttctgctgccttgcacctgttcgagcaccaaagttgggtcataaaaggccatatgcacttgtgtctgtatatatgtatgtatagacatgtataaaagtttaatatagaaaataatttcttctgcccttggaaatctgataaaaaaacttttaagcaaaggacacagaaaaggtcttctatatggtatagtgaaaatattcttaataaaataccatccgttaa

SEQ ID NO: 8106 - DNA, 628 bp, Homo sapiens
agagctctggcctctctacatggattgggaaccagatgttgtccctgagcagcctcccaccgtgggctgtcaccctgctggcatgcatcctcgtgtccattgtcactgagtttgtgagcaacccagcaaccatcaccatcttcctgcccatcctgtgcagcctggtgaaagctggcctgggagtcaacgttattggactggtgatagtaatggtggccatcaacacctggggagttagcctcttccacctggacacttacccagcatgggcgagggtcagcaacatcactgatcaagcctaacgccaagtgtacaaactggcccaaccacaggagctgccagtatccagcagtatctggaccacaggcaaagaaaaccactaggaccaccaggagcacacaaccccagacccacgccggagggcatccctccaccagaagattccgccacctcaagtgaactgcaggaatcctccaacaaccacaaacacatgcttcgctgttagtgtcttcttcctgccctcagcaccacagctcaagaaaacctaaagtttcaatacaagccataggctcacagaaaaagaaaaagaaaataaaaattaaattaaaaaaaaagaagacaaagaaaa

SEQ ID NO: 8107 - DNA, 422 bp, Homo sapiens
gacatcaccaagctcagtctacgcctctgcacagggaacctctaccttctctcgagagcttttgtccccccggatctcaaggtgctgggagagatatgccttcgaggatatttggatgcattcaggttcttggaagagaagggcatctgcaacaggccccagccaggcctgaagtcatcctcagaagggatggatcctgaggtcgccatgcccagctgggcaaacatgagtctggattcttccccggagtcggctgccttggctgtgaggctggagggagatgagctgctagaccacctgcgtctcagcatcctgccctgggatgagagcatcctggacaccctctcgcccaggctcgctacagctatgatattggaaatggacatgtcttttcaaggaaaataaaagcaggctttctggaa

SEQ ID NO: 8108 - DNA, 566 bp, Homo sapiens
atattgcccaagttggagcctccagcgtagtaggatccatgccttccagtatgtcatctatggaactgcctctttcttcttcctttatggggccctcctgctggctgagggcttctacaccaccggcgcagtcaggcagatctttggcgactacaagaccaccatctgcggcaagggcctgagcgcaacgtttgtgggcatcacctatgccctgaccgttgtgtggctcctggtgtttgcctgctctgctgtgcctgtgtacatttacttcaacacctggaccacctgccagtctattgccttccccagcaagacctctgccagtataggcagtctctgtgctgatgccagaatgtatggtgttctcccatggaatgctttccctggcaaggtttgtggctccaaccttctgtccatctgcaaaacagctgagttccaaatgaccttccacctgtttattgctgcatttgtgggggctgcagctacactggtttccctgctcaccttcatgattgctgccacttacaactttgccgtccttaaactcatgggccgaggcaccaagt

SEQ ID NO: 8109 - DNA, 1754 bp, Homo sapiens
ctaggtttctgccattattacctgcccgaggagcagttccccaagggctttgccttcgactgtgatgacgtgaacttcaccacggacaacctctgctttgtgggcctcatgtccatgatcgacccaccccgggcagccgtccctgacgcggtgggcaagtgtcgcagcgcaggcatcaaggtcatcatggtcaccggcgatcaccccatcacggccaaggccattgccaagggtgtgggcatcatctctgagggcaacgagactgtggaggacatcgccgcccggctcaacattcccgtcagccaggttaacccccgggatgccaaggcctgcgtgatccacggcaccgacctcaaggacttcacctccgagcaaatcgacgagatcctgcagaatcacaccgagatcgtcttcgcccgcacatccccccagcagaagctcatcattgtggagggctgtcagagacagggtgcaattgtggctgtgaccggggatggtgtgaacgactcccccgctctgaagaaggccgacattggggtggccatgggcatcgctggctctgacgtctccaagcaggcagctgacatgatcctgctggacgacaactttgcctccatcgtcacaggggtggaggagggccgcctgatcttcgacaacctaaagaagtccattgcctacaccctgaccagcaatatcccggagatcacgcccttcctgctgttcatcatggccaacatcccgctgcccctgggcaccatcaccatcctctgcatcgatctgggcactgacatggtccctgccatctcactggcgtacgaggctgccgaaagcgacatcatgaagagacagcccaggaacccgcggacggacaaattggtcaatgagagactcatcagcatggcctacgggcagattggaatgatccaggctctcggtggcttcttctcttactttgtgatcctggcagaaaatggcttcttgcccggcaacctggtgggcatccggctgaactgggatgaccgcaccgtcaatgacctggaagacagttacgggcagcagtggacatacgagcagaggaaggtggtggagttcacctgccacacggccttctttgtgagcatcgttgtcgtccagtgggccgatctgatcatctgcaagacccggaggaactcggtcttccagcagggcatgaagaacaagatcctgatcttcgggctgtttgaggagacggccctggctgccttcctgtcctactgccccggcatggacgtggccctgcgcatgtaccctctcaagcccagctggtggttctgtgccttcccctacagtttcctcatcttcgtctacgacgaaatccgcaaactcatcctgcgcaggaacccagggggttgggtggagaaggaaacctactactgacctcagccccaccacatcgcccatctcttccccgtcccccaggcccaggaccgcccctgtcagtccccccaattttgtattctggggggaggagccctctcttcctgtggccccaccttggcccccaccccctccactatctcctgccgcccccactctggctggcttctctcccctgccccaaacctctctcctctctcttttctgtgtcagtttctctccctctcctcacccctctatccattcctcccgccccagccacctccctgggctcttttttactccccttcagccccccggctgatgccatctctggttctggacaattatcaaatata

SEQ ID NO: 8110 - DNA, 1413 bp, Homo sapiens
gcgcctggtttctgacaagcagttaagaacatctctgagtgtcctcagaaacacttgatgacgtcgtttctcctggcactgggaaacatctacaagtctgagataaacaagctggctgaccctcaggtgcctgatagtcaaacaggatacctgcccactatgtctatccgcaggcttttgtgcagccgggagtggtcattccacacgtccagccgacagcagctgccgcctccaccaccccttacattgattacactggagctgcatacgcacaatactcagcagctgctgctgctgccgccgccgctgctgcctatgaccagtacccctatgcagcctctccagctgctgcaggatatgttactgctgggggctatggctacgcagtccagcagccaatcaccgcagcggcacctgggacagctgccgccgccgctgcagcagctgctgccgctgcagcatttggccagtaccagcctcagcagctgcagacagaccgaatgcaatagaccagccatctgatcaaagttgaattgttttctctttccctcccaattttccaatttttagtagctaataagagagttaacattgacttaacagctttaaaaaaaaaaacagccatgctattgtgaagcagagttattattttttttatactccaggtagtgttctagatgagaaagaggtaagaatgaggggaatgggcacaattttggaaatcaatcccaaagagcctgagtaaatgaaaggccactacgaaatgacgccaggagtaacaacggaacttcacttttgtaacgggatttttatttttgctctttttatagtatcagggaagcaaactgccttttacaagttagaaaatgctgtttgaatctagttgaaccagggaatacagagcgagcaatatgtagcttgaattacatttaaaagcagattttttacaaacaaaatggcgaaagcactgattgtcatttttagcagtcacttaaggcctatagaacttttttcaagtcggaaggtcctgttcttactatctcaaaaatgggcatcgaacaatcaatctaggagcgtggcagtgggtaaaatggtggacaggcaccaaagctattttctcatctgtcctgtggatgagtggaactgtggaacaagtgatgtggaattaatgggtgcaacagctgtacagacaatcaataacacacacagttctggaaagaacacatcacttgtgcttgtttgatgagcttgtcacattctaatccctctccccatcctgtttcaattttgggaaacttgtatctgctggtgtcagcaattctgattctgaaataggatcaggcttttactacaacagccttctctttctatttattgtgtcgactcgtggcttatgaataaaggcaggcaaag

SEQ ID NO: 8111 - DNA, 749 bp, Homo sapiens
aggccaggttgctgtgctggctcatcctccttagaaagatatgcaacctccaatgagttccctgatgataccctgaacttcatcaagacgcacccgctcatggatgaggcagtgccctccatcttcaacaggccatggttcctgagaacaatggtcagatgcagctatgatggagtcgaagacaaaaggatcatgggcatgcagctggacagagcaagcagctctctgtatgttgcgttctctacctgtgtgataaaggttccccttggccggtgtgaacgatatgggaagtgtaaaaaaacctgtattgcctccagagacccatattgtggatggataaaggaaggtggtgcctgcagccatttatcacccaacagcagactgacttttgagcaggacatagagcgtggcaatacagatggtctgggggactgtcacaattcctttgtggcactgaatgggcattccagttccctcttgcccagcacaaccacatcagattcgacggctcaagaggggtatgagtctaggggaggaatgctggactggaagcatctgcttgactcacctgacagcacagaccctttgggggcagtgtcttcccataatcaccaagacaagaagggagtgattcgggaaagttacctcaaaggccacgaccagctggttcccgtcaccctcttggccattgcagtcatcctggctttcgtcatgggggccgtcttctcgggcatcaccgtctactgcgt

SEQ ID NO: 8112 - DNA, 1432 bp, Homo sapiens
gcttcagtatttactggatgtgacaagcagagagaagagctttcagtggggccgcttgctgcctggctcaagtggtgggagaacaccttaacccgaagcctctctgaccatccagttggcaaagaccctcaggccatgaggactggccaaagacagtgagaggacgtgcaagggtaaattcctgagccccgcagtcttatttcctgccctgacgtccctgcataccagcccaagggttaaccgtaagctgatgcctgtatggcggccttactgatgccacgcaggaacaaagggatgaggactcgactgggatgcctgtctcacaagtcagactcgtgtagtgatttcacagctattcttccagacaaacccaaccgcgctctcaagagattatcgacagaagaagctacgaggtgggcagattcctttgatgtgcttctctctcataagtatggggtggctgcattccgtgccttcttgaagacggagttcagtgaggagaacctggaattctggttggcctgtgaggagttcaagaagaccaggtcaactgcaaaactggtctctaaggcccataggatctttgaggagtttgtggatgtgcaggctccacgggaggtaaacattgacttccagacccgagaagccacgaggaagaacctgcaggagccatccctgacttgctttgaccaagcccaaggaaaagtacacagcctcatggagaaagactcttaccccaggttcctgaggtccaaaatgtacttagatctgctgtcccaaagccagaggaggctcagttagacctcagaagggaactcctggaaatcaccggctttcccctccacttgctgccaagatcatattctaatgtgaaatgtcataggtgttcaaaagcggtggcattgggggtgggaggctgggggtgaggagggaatgaagggccattccaaagtatgacccagctgccggagcttggactctattccatttacccatgtttgtgttttggttagtggtagcgccttgccgctgtcacccttttctgggtcagcaacttgcccttcatataatgccttgggtcacctctgctgagagggcagatttgctgtgctaggctaatctgtaaataatgcaaatgcaattcccaccacctccacaccctcctcggttaggattcctgactctccacttgttgtaaatccctgggaggaatagctgaaagacttgggctcaactctgtgatttgtagtggccagctctgctcactgggatctcacagcttaggagagaggtttctgtggaattccaggtttctagttctgtcattgacaggtgacctctcagagaaggagtgaaatccatggagttgtttgtttcttccatttccattggaccagtgtgaaaaactgtgattacttcccatcttggccta

SEQ ID NO: 8113 - DNA, 386 bp, Homo sapiens
tctggtgaccagcagcggacaaataaaactcgctgacttcggccttgcccgcatctatagtttccagatggctctaacctcagtggtcgtcacgctgtggtacagagcacccgaagtcttgctccagtccagctacgccacccccgtggatctctggagtgttggctgcatatttgcagaaatgtttcgtagaaagtaagaaatacattttgtttcactctgctttccttgaaaagagactgtggatctttgtgaatttgagtggcagcatggcatttctatcattaggggtcatgatggccagatccatctaccccaggctaccacttgcaagcctgtcctgaaaccgccttctcagtgcttacagtgttgttttatatgactgt

SEQ ID NO: 8114 - DNA, 1138 bp, Homo sapiens
gaacaggacaaccaaaactgctctgctcttccgaaaattgcagtcagggaacctgggacccggcaagccagcagaaggagccattgactaatagttgagtataacacaggttgtgtttccgggctgctgaaacatgacactaatattttcaaagaactgtggaagcctaaaaggaagccaatgagaaataactaaatgagagtttaggactgcagccttcattttcattcaaagatttaaaagtttccataaagtaaaatgttcttctccggccacctgttttcatagttctgtgttttccttcaggcctttctggcttcctatatggcagtaagaaaatgatgtgcttaatgattacaaatttcatatggaatacgaactttcagtttgtacatatgatgcacagagatgcttttgtggttttattggttttcatattacaaacaaagaaactagaaaatgaaaccattccaaaagtggaagtaatttctcactgcccctgtgataaactgtggtcactggctgtggcagcaactattataagatgctctgaaaactcttcagacactgaggggcaccagaggagcagactacaagaatggcacacgctatggaaaactcctggacaatcagtaaagagtaccatattgatgaagaagtgggctttgctctgccaaatccacaggaaaatctacctgatttttataatgactggatgttcattgctaaacatctgcctgatctcatagagtctggccagcttcgagaaagagttgagaagttaaacatgctcagcattgatcatctcacagaccacaagtcacagcgccttgcacgtctagttctgggatgcatcaccatggcatatgtgtggggcaaaggtcatggagatgtccgtaaggtcttgccaagaaatattgctgttccttactgccaactctccaagaaactggaactgcctcctattttggtttatgcagactgtgtcttggcaaactggaagaaaaaggatcctaataagcccctgacttatgagaacatggacgttttgttctcatttcgtgatggagactgcagtaaaggattcttcctggtctctctattggtggaaatagcagctgcttctgcaatcaaagta

SEQ ID NO: 8115 - DNA, 405 bp, Homo sapiens
cggacgggggtgaaggggacgaccaaaggtcgtcattataagcaaacaaccagggtctcagtgggattattattactattttttccccctctgcagactgaaaaaatgcagaccgccggggcattattcatttctccagctctgatccgctgttgtaccaggggtctaatcaggcctgtgtctgcctccttcttgaatagcccagtgaattcatctaaacagccttcctacagcaacttcccactccaggtggccagacgggagttccagaccagtgttgtctcccgggacattgacacagcagccaagtttattggtgctggggcagccacagttggtgtggctggttcaggggctggcattggaaccgtgtttggcagcttgatcattggctatgccaggtaa

SEQ ID NO: 8116 - DNA, 1335 bp, Homo sapiens
gaacagcccagcctggagcgggaagcagggacaagatgacctcaggaatcccaggctgcgggggtgcctgcgtcctcccctcccgagctccactccgcaggcgagacccccaacactgctccccgacactctccgaggcacccctcctccgtgctcacacccaaacacgtctgctcacccgtgggcttcccaccccgaacacaacgaggactgtccaggtgtcagtgacggtcaccccgacctggtcccctgtccggcctcgccaggacaggctgctttggtttgtgacctccaggcaggacggccatcctctccagaatgaagatcttcttgccagtgctgctggctgcccttctgggtgtggagcgagccagctcgctgatgtgcttctcctgcttgaaccagaagagcaatctgtactgcctgaagccgaccatctgctccgaccaggacaactactgcgtgactgtgtctgctagtgccggcattgggaatctcgtgacatttggccacagcctgagcaagacctgttccccggcctgccccatcccagaaggcgtcaatgttggtgtggcttccatgggcatcagctgctgccagagctttctgtgcaatttcagtgcggccgatggcgggctgcgggcaagcgtcaccctgctgggtgccgggctgctgctgagcctgctgccggccctgctgcggtttggcccctgaccgcccagaccctgtcccccgatcccccagctcaggaaggaaagcccagccctttctggatcccacagtgtatgggagcccctgactcctcacgtgcctgatctgtgcccttggtcccaggtcaggcccaccccctgcacctccacctgccccagcccctgcctctgccccaagtggggccagctgccctcacttctggggtggatgatgtgaccttccttgggggaccgcggaagggacgagggttccctggagtcttacggtccaacatcaggaccaagtcccatggacatgctgacagggtccccagggagaccgtgtcagtagggatgtgtgcctggctgtgtacgtgggtgtgcagtgcacgtgagagcacgtggcggcttctgggggccatgtttggggagggaggtgtgccagcagcctggagagcctcagtccctgtagccccctgccctggcacagctgcatgcacttcaagggcagcctttgggggttggggtttctgccacttccgggtctaggccctgccccaaatccagccagtcctgccccagcccacccccacattggagccctcctgctgctttggtgcctcaaataaatacagatgtcccccag

SEQ ID NO: 8117 - DNA, 673 bp, Homo sapiens
attctccacacactcttcctttcaatccagaagttgttactagtaactcctgccattcctaatgacatttttaccactttctttcttgtagagaagtgggtagagagaatcactttgtgtctttaccctcaacttgaccatggctttaggcaaacagactgtcttggctttctatgaccaacttttaaataggagcagacagaaacttgggtcatagttctgcagtcacaagggctttgtagtcagtcttagctgctggaacattcaaggagacaaaaaggcacagaagatctccacacatactttgatgccaactacagcaagttgcaagaccatttctctgctgaaactcctttattctgaagattccaagcaagaaagtattcagcagtggctggactctggattctttgtctctgcaaatgaaaactttcaacaagtcattgaccgcactgtttctttgtatgaacaagggatggttcaaatgactgtgaaagactacatgagatctttgcatcagttttcagaaactcccatcctatccagagggaccagtttcaactcttgctattctactgcaagtgtaccacaaagcattcctgaatggctggaattttgggagatagatccagtggagattctcttggatctggggtttggtgctgatgagcca

SEQ ID NO: 8118 - DNA, 549 bp, Homo sapiens
attacaggtatcagttaagaaaacaaagcagtggtgttttaccactctgcagagaaagctaaggttgctaaccaaacaaaataactttacactgacaatgccaatttttacatttctttcagaacaagggacactcaaactaccagagaaacggaccaatggactgcgaagaactcctaaacaggtggatccaggtttaccaaagatgcaggtcattaggaactattctggaacaccacccccagctctgcatgaaggaccccctttacagctccaggccggggataccgttgaacttctgaaaggagatgcacacagtctgttttggcagggcagaaatttagcatctggagaggttggattttttccaagtgatgcagtcaagccttgcccatgtgtgcccaaaccagtagattattcttgccaaccctggtaagtattaaaaatgtttatgtagctaggttgaaataccatacccttagctccaggatgccttaaatgtgggggtagtaaaccatattccatttccatttgtctcggctaaaggtg

SEQ ID NO: 8119 - DNA, 849 bp, Homo sapiens
gaaggtggctgctagtgttctaagttactactgatgtgaacagattctgacctttggctgcctagttgtttttgataaattaactcttagaataatgatgaatgtcttggccgttcctcaaaaacctttggctgtttgcagcagatgatggatgtctagaaaacacccctgacactgcagagttcagtcgagagttccagttgcaccagcatctctttgatccggaacatgactatccaggcttgggcaagtggaacaagaaactcctttacgagaagatgaagggaggagagagacgaaagcggagggtaacacgtgcctggctggattgttgcggggatgcttggagctttctgagtggggcagtgaacaggctgaaaccctcgcttgttgggaagtcacagaatcctcccttgtgtagtcctgagaaacactggtccatgtgacaagggccacacccagaaagtctgtccttggtttctgcgatggcttccccaggctttagcagatgatttttagtggaacgcgcagtctgtagcaattctagcaactccattccgttcaggaaatgtgtattgcttcccccatcagtgtgggacatatctggggggacatgagggtctgtctgccctcccagggtctgtaggccagtggggaaaaactgatcacacatctgcatcaattctataaaaacacaggacagaaacagggaagtgctgaactgcatgctccaggaaataactttgaaggaattcgggagcaaaagatgagatgaacaaacttaatttctcctatgtatctttttttcttggcctagccagactgatgtaaaatctactagatctgtaa

SEQ ID NO: 8120 - DNA, 606 bp, Homo sapiens
atgaactttctgctgtcttgggtgcattggagccttgccttgctgctctacctccaccatgccaagtggtcccaggctgcacccatggcagaaggaggagggcagaatcatcacgaagtggtgaagttcatggatgtctatcagcgcagctactgccatccaatcgagaccctggtggacatcttccaggagtaccctgatgagatcgagtacatcttcaagccatcctgtgtgcccctgatgcgatgcgggggctgctgcaatgacgagggcctggagtgtgtgcccactgaggagtccaacatcaccatgcagattatgcggatcaaacctcaccaaggccagcacataggagagatgagcttcctacagcacaacaaatgtgaatgcagaccaaagaaagatagagcaagacaagaaaatccctgtgggccttgctcagagcggagaaagcatttgtttgtacaagatccgcagacgtgtaaatgttcctgcaaaaacacagactcgcgttgcaaggcgaggcagcttgagttaaacgaacgtacttgcagatctctcaccaggaaagactgatacagaacgatcgatacagaaaccacgctg

SEQ ID NO: 8121 - DNA, 563 bp, Homo sapiens
ctttacgctccccactcccggtgcagcagccaaccttcagccagcagcggggctcattagaagagggtcccctggacacttgatttttagctcactggtgactggaaagagttaatacctattctttgctgccccccgcacagcctctgggtgcagagggaggcagctgtgggctgtggggacttctccctgagctgcagccagaggagcttcagaacaccttaacccgaagcctctctgaccatccagttggcaaagaccctcaggccatgaggactggccaaagacagtgagaggacgtgcaagggtaaattcctgagccccgcagtcttatttcctgccctgacgtccctgcataccagcccaagggttaaccgtaagctgatgcctgtatggcggccttactgatgccacgcaggaacaaagggatgaggactcgactgggatgcctgtctcacaagtcagactcgtgtagtgatttcacagctattcttccagacaaacccaaccgcgctctcaagagattatcgacagaagaagctacgaggtgggcagattccttt

SEQ ID NO: 8122 - DNA, 1252 bp, Homo sapiens
aagcaggcagctgccagaaatttgttggatttgaggagtccagagcgccgacccgctctgtctgcgtggacttatttccttggatcttcgtggactctgaagttgccaagtgtgtgtgcctgctccagaaaacaaaggaagccaccattttttctcattcacagtgcagggagatacctcagtagaagcatacagtccagtcttcaactagggacccctaccaggatgtccaaaaggctcagccctcagttacagcacaacatcacagaagatgcctattgtgaaacacacctggaaccaacacggctgttctgtgatgttgaccaaatcacactctgcagcaaatgcttccagtcccaggagcacaaacatcacatggtgtgtgggatacaagaggctgctgagaattacaggaagttattccaggaaatattgaacacatcgagggagaaacttgaagcagctaaaagcatattgactgatgagcaagaaagaatggcgatgattcaggaagaggaacaaaattttaaaaagatgattgagtctgagtatagtatgagactccggttgttgaatgaagagtgtgagcagaatctccagagacagcaggaatgcatatctgacttgaacctgagagaaacccttctgaatcaagcgatcaagcttgccaccgagctagaggagatgttccaggaaatgctacagagactgggccgtgtggggagagagaacatggagaaactgaaggagagtgaagccagggcttctgaacaggtccgcagcctcctaaagctcatcgtggagcttgagaaaaagtgtggggaaggcaccttggcattgctcaaggtaagatgctgggaaaaagaaaataaaattcattccagtatttgagaaatgagaagtggacagtactcattaggggttgctgtcagaacacaatatccaatgatcttcaaccacaaaagaaggctacatgactttctttcagctgccaaaagctttaggaatggtcatagctttgtgggatagtgtggagctgcttcatgagatgaattctcaccttaaaattatcagcagtaagttagggttgagatgtgacacaatgtggttaatacctccatgcaatgaaatattctgtgatcataaagaataaaacagctctataggcactaacagtatttcaagcactcattaagtgaaaaagaaagatgcagactgctttttgtttgatctttggataataagtatatat

SEQ ID NO: 8123 - DNA, 457 bp, Homo sapiens
gaaagtgcgctggaagcttttagggttgggacgcgcctgcacatgggctggttagctcctgaaacttgttcgttcctgtgtgcataacctggggttgggagattcgggtcagcagatctgtgagagccgggtgggaattacgttcctacagtgtttgagaattacacggccagttttgaaatcgacacacaaagaatagagttgagcctgtgggacacttcgggttctccttactatgacaatgtccgccccctctcttaccctgattcggatgctgtgctgatttgctttgacatcagtagaccagagaccctggacagtgtcctcaaaaagtggaaaggtgaaatccaggaattttgtccaaataccaaaatgctcttggtcggctgcaagtctgatctgcggacagatgttagtacattagtagagctctccaatcacaggcagacgccagtgt

SEQ ID NO: 8124 - DNA, 586 bp, Homo sapiens
ttgcagctcggagcctgtggcggatggtgggactctccggccctgtgcagttatcaaatgataagaactgagcacactggatgaaataatacttgcactgggagcactaagaaaagattgatctctgggctggtgaacataatctctgtcccagtcagaaaaggagagaggaaattagcagagcgattggtggagaatgatatctgtcaaaagaaacacttggagagcactgagtttagtaataggtgactgccggaaaaaagggaactttgaatattgtcaagataaaccccacttgaaaaactgaggtgcttaaggagtaaaataatatgttcctggtggcatcctccagatcgtactgagaagcactccacaatgccagactcacctgtggatgtgaagacgcaatctaggctgactcctccaacaatgccacctcccccaactactcaaggagctccaagaaccagttcatttacaccgacaacgttaactaatggcacgagccattctcctacagccttgaatggcgccccctcaccacccaatggcttcagcaatgggccttcctcttcttcctcctcct

SEQ ID NO: 8125 - DNA, 470 bp, Homo sapiens
actaacttaccccattttctatatcatgtttatcatcatgatagcatcttgtgttttccaagtcaagttcctgaatcaagccacgaaactctacaatacgacaacagtggtgccagttaatcatattttctttacaatcagtgccatcattgcaggtatcatattttatcaggaattccttggtgctccttttctcactgtatttatatatctttttgggtgagtaaatgtctcagaggtaaagcatgtgaaattctattacttttacgtaggattttcggcattgtaccggaggtatagaaaattggaaaataatataagaaacatcagtttcctgagctcctaaaagaaacatattttttaacttaaggccctaaacagggctcagcgtctttggctttgtgacttaggtatatctctgctgttctgaaacattggggatttccaattccaggccaaagacaagatac

SEQ ID NO: 8126 - DNA, 2123 bp, Homo sapiens
cacttttccaagcagtaaggaatgatgccatcctcaagtacggattgcctgcgtttaggaggtggctgcgttgtgggaaaagctatcaaggaagaaattgccaaaccatgtctttttttctgttttcagagtagttcacaacagatctgagtgttttaattaagcatggaatacagaaaacaacaaaaaacttaagctttaatttcatctggaattccacagttttcttagctccctggacccggttgacctgttggctcttcccgctggctgctctatcacgtggtgctctccgactactcaccccgagtgtaaagaaccttcggctcgcgtgcttctgagctgctgtggatggcctcggctctctggactgtccttccgagtaggatgtcactgagatccctcaaatggagcctcctgctgctgtcactcctgagtttctttgtgatgtggtacctcagccttccccactacaatgtgatagaacgcgtgaactggatgtacttctatgagtatgagccgatttacagacaagactttcacttcacacttcgagagcattcaaactgctctcatcaaaatccatttctggtcattctggtgacctcccacccttcagatgtgaaagccaggcaggccattagagttacttggggtgaaaaaaagtcttggtggggatatgaggttcttacatttttcttattaggccaagaggctgaaaaggaagacaaaatgttggcattgtccttagaggatgaacaccttctttatggtgacataatccgacaagattttttagacacatataataacctgaccttgaaaaccattatggcattcaggtgggtaactgagttttgccccaatgccaagtacgtaatgaagacagacactgatgttttcatcaatactggcaatttagtgaagtatcttttaaacctaaaccactcagagaagtttttcacaggttatcctctaattgataattattcctatagaggattttaccaaaaaacccatatttcttaccaggagtatcctttcaaggtgttccctccatactgcagtgggttgggttatataatgtccagagatttggtgccaaggatctatgaaatgatgggtcacgtaaaacccatcaagtttgaagatgtttatgtcgggatctgtttgaatttattaaaagtgaacattcatattccagaagacacaaatcttttctttctatatagaatccatttggatgtctgtcaactgagacgtgtgattgcagcccatggcttttcttccaaggagatcatcactttttggcaggtcatgctaaggaacaccacatgccattattaacttcacattctacaaaaagcctagaaggacaggatactttgtggaaagtgttaaataaagtaggtactgtggaaaattcatggggaggtcagtgtgctggcttacactgaactgaaactcatgaaaaacccagactggagactggagggttacacttgtgatttattagtcaggcccttcaaagatgatatgtggaggaattaaatataaaggaattggaggtttttgctaaagaaattaataggaccaaacaatttggacatgtcattctgtagactagaatttcttaaaagggtgttactgagttataagctcactaggctgtaaaaacaaaacaatgtagagttttatttattgaacaatgtagtcacttgaaggttttgtgtatatcttatgtggattaccaatttaaaaatatatgtagttctgtgtcaaaaaacttcttcactgaagttatactgaacaaaattttacctgtttttggtcatttataaagtacttcaagatgttgcagtatttcacagttattattatttaaaattacttcaactttgtgtttttaaatgttttgacgatttcaatacaagataaaaaggatagtgaatcattctttacatgcaaacattttccagttacttaactgatcagtttattattgatacatcactccattaatgtaaagtcataggtcattattgcatatcagtaatctcttggactttgttaaatattttactgtggtaatatagagaagaattaaagcaagaaaatctgaa

SEQ ID NO: 8127 - DNA, 663 bp, Homo sapiens
ctacaaatagttccgtgagaaagatggccgggaactcgatcctgctggctgctgtctctattctctcggcctgtcagcaaagttattttgctttgcaagttggaaaggcaagattaaaatacaaagttacgcccccagcagtcactgggtcaccagagtttgagagagtatttcgggcacagtaagtaatgcttcttccacccttcatggatctgtgcctgccatacagacacaattcctgactaggggaaagggatatggagaagaccctaagttcatgtgcaatatctagttataacaagtcactcttcacagccaagaccgttctcagaatccagaaagtttgaagggttcggggcatgaagtctctgcccacatctattaccaattcagcagggtatatttacagaaaaggctgggatctcaggagggactgctgtgtctcccaaggagggtcactgggtcaaagaggccccctggagccttgtgagaccacaatagtctgaagttggattcgttatgctacaattttctatcttattttttcctccctacttcaaaacagaggtagatcaggattaatcttttgccagtttctctgtgaaccatttcttaaaatcagaaacctgtaagaatgagaaagcttgccagctcacatgcatg

SEQ ID NO: 8128 - DNA, 745 bp, Homo sapiens
gggcaaggtaaggaccactgactgtgcctgacagaaagctagagaaccttcagttgaccttaatttacaccgaaatgattcagattaaaagatggagtcttacatggcccttcatgtttcccacatgtagaagagacttggttttcatgttggttggttcctttattggtgttatgtttcttctgtttcttctctgtttcaattgaatatcaccatcctttctccgcaggtaacggaaggccattggaaatggggcggcgtcacagtccaagtgaacagtgcctttttcacaggcatctatgggatgtggaatctgtatgtctttgctctgatgttcttgtatgcaccatcccataaaaactatggagaagaccagtccaatggcgatctgggtgtccatagtggggaagaactccagctcaccaccactatcacccatgtggacggacccactgagatctacaagttgacccgcaaggaggcccaggagtaggaggctgcagcgcccggctgggacggtctctccataccccagcccctctaactagagtggggagcatgccagagagagctcaatgtacaaatgaatgcctcatggctcttagctgtggtttcttggaccagcggcatggacatttgtcagtttgccttctgacggtagcttttggaggaagattcctgcagccactaatgcattgtgtatgataacaaaaactctggtatgacacattttctgtgatcattg

SEQ ID NO: 8129 - DNA, 749 bp, Homo sapiens
aagcccttacaggtcaccttgaggaggttgttttagctctgctaaaaactccagcgcaatttgatgctgatgaacttcgtgctgccatgaagggccttggaactgatgaagatactctaattgagattttggcatcaagaactaacaaagaaatcagagacattaacagggtctacagagaggaactgaagagagatctggccaaagacataacctcagacacatctggagattttcggaacgctttgctttctcttgctaagggtgaccgatctgaggactttggtgtgaatgaagacttggctgattcagatgccagggccttgtatgaagcaggagaaaggagaaaggggacagacgtaaacgtgttcaataccatccttaccaccagaagctatccacaacttcgcagaggtaacaataaatttctttttctggaatctgtttatggaagatgcaattttcttttttgatgacaaataagagaaagtaaaaacagaaccctttttcaatatcactcctgtatcaaacagatacagtgttcctgacccattgttatttgtcaatttgtccaattttgtacagccgctactttatcatatttaatacattttgtgacttgggcatgtggaacataattttgttattttcactgcttttactcccctaaaagatttggaatatgtgtgggaaaagacatgcataacagaacaaatgaaattagaatgaagaaaaacaaaaaaaaaaaa

SEQ ID NO: 8130 - DNA, 560 bp, Homo sapiens
aggtatgatctcgtgaaatcttgagagaaactgaatgacgaatgaaactattgttcctgtttcacacagaagaaaactgaggttaaaaggggttggcactcatcatgagcccctgttctcattctgcaaatggtgaagctctctattgtcctgaccccacagttcctgtcccatgaccagggccagctcaccaaggagctgcagcagcatgtaaagtcagtgacatgcccatgcgagtacctgaggaaggttgatggacggatggctacatggatgtgatggagatggtttactatcgggaccttccgcaccctgctgatgttttgttgcttaggatatgaatggctgagcggaggctgtaaaacctggcactctgcttgggttatcaatactctggctgaccatcatcatcgtgggactgactttggtggaagtccttggttacatgtcattattgcatttccgacaagttataaagttgtcattaccctctggatagtttacctttgggtgtctctcctgaagactatcttctggtctcgaaatggacatgatggatc

SEQ ID NO: 8131 - DNA, 574 bp, Homo sapiens
gattcagaagtcgataagaccaggagaagtgaagatgtaacatgttatctgtcgctcctcttagctggcggagagaatttacatttaaagattagcagagtgagaaagagaaatctgccttttgttgtgtggggtgaggaggaggcatctacccctggccttgacgctatctcccatcacctctgctatccagacaggactcaccgagataaaccccacttgaaaaactgaggtgcttaaggagtaaaataatatgttcctggtggcatcctccagatcgtactgagaagcactccacaatgccagactcacctgtggatgtgaagacgcaatctaggctgactcctccaacaatgccacctcccccaactactcaaggagctccaagaaccagttcatttacaccgacaacgttaactaatggcacgagccattctcctacagccttgaatggcgccccctcaccacccaatggcttcagcaatgggccttcctcttcttcctcctcctctctggctaatcaacagctgcccccagcctgtggtgccaggcaactcagcaagctgaaaaggtt

SEQ ID NO: 8132 - DNA, 559 bp, Homo sapiens
ccgccagatttctgtgtgcccacttgccagccacgatgtccggattcctgtggaaaggggagggttgcttatggaaccacagagaacagtcccgtgacattcgcgcacttccctgaggacactgtggagcagaaggcagaaagcgtgggcagaattatgcctcacacggaggtgagcccctgaccaagactccaaagtcccacctcccgtcacccagctggggtgcacccagctgggacatcggttgctttcagtgagagagtcaaatggctcactcaggatgcctagagccccccagcagcaggggtgtgctaggcctggcccggagtgttctctgtgggctaagcatgaaaggggaagagctggaacagtggctgtgagcggctgccagctgaacttctccgcggcctcccttcctgtctgaggtgtgtttttgccaagcccactgtctgtttcagggcagccagggtagcctcaaagaggagccagagcacagagagttttcctacacagcttcttttcctccagtggtgctcgcctctcgctttagcagagttct

SEQ ID NO: 8133 - DNA, 1006 bp, Homo sapiens
gaagaggaacaaaattttaaaaagatgattgagtctgagtatagtatgagactccggttgttgaatgaagagtgtgagcagaatctccagagacagcaggaatgcatatctgacttgaacctgagagaaacccttctgaatcaagcgatcaagcttgccaccgagctagaggagatgttccaggaaatgctacagagactgggccgtgtggggagagagaacatggagaaactgaaggagagtgaagccagggcttctgaacaggtccgcagcctcctaaagctcatcgtggagcttgagaaaaagtgtggggaaggcaccttggcattgctcaaggagcaagtcactgctgcttgagcatctggagcccgctcatatcacagacctgagtttatgccacataagaggactcagcagcatgttcagagtactccagagacatttaacattggatcctgaaacagctcatccctgcctggcactatctgaggacctgagaactatgagattgagacatgggcagcaggatggggctggcaacccagaaagattggatttcagtgccatggtgctggctgcggagagcttcacctcagggaggcactactgggaggtggacgtggaaaaggcaaccaggtggcaagtgggcatataccacggctctgcagacgcgaagggcagcacggccagagcttccggagagaaagtcttgctcacggggtcggtgatggggaccgagtggactctctgggtcttcccccctctgaaaaggctcttcctggaaaagaagttggacacagttggcgttttccttgactgcgaacacgggcagatatcattctacaatgtgaccgagatgtccctcatttacaatttctcccattgcgccttccaaggagctctcaggcctgtgttttccctctgtatcccaaatggagacacaagtccagactccctcaccatcttacaacatggtccttcttgtgatgctactgttagcccttaa

SEQ ID NO: 8134 - DNA, 466 bp, Homo sapiens
ggatgccagcaaccgaggaccgttgtcatagtcccagcacaaaatgaggctgctttcttcttgggggtttagggatcccagaccacaaggatttgattaaaacagagaccccagagttagcgttgtctacctgggacatctcccagccccccttcaccctcacaaattctgcagtgtgtttttaatgatgtgtctttgggtgatgagtatgctctgggactaggtggaggtggtggttgcatctcccatgtagctcatggtcaatacaggtggtgattgtacaatattgtgaatatatgaaacaccattgaaggaggggggaaggaaagaaagaaaaataggagaagaaaggaagaaagaaagctgggggtctagtgaaaaccattttacagaagtaaagtaggcaaaaagttaaaaggataaatggttgcaggaaagtaaacagttccaggtgcaggggctttaa

SEQ ID NO: 8135 - DNA, 664 bp, Homo sapiens
tgcttttcctgcgtcctgctgggagctgcgcgctccaggtatcctggcctgccgccctagccggcccaaggagccacacaggacagttgacccaacacttctgccacctgaagaacgacacctgcattcctccatctctgggaccaccaaggaactcagggagcttggaatctctcagatcaaaaagatactgactcatcggatagccatgccatcctgaaaacggccttcctttgaagaaaatgtgagtgggaaacatgaagagtgatgaaatgaacaagttgagtgactcccaccctgttgaagagattgaacttcatccccagttcctgtgaagctttctggatctcgtcttccaaggtgaagtggaggttctggatccgaacgaccctttaggaccccttgatgggcaggacggcccgattccaactctgaaaggttactttctgaattttctggagccagtaaacaatatcaccattgtccaaggccagacggcaattctgcactgcaaggtggcaggaaacccaccccctaacgtgcggtggctaaagaatgatgccccggtggtgcaggagccgcggcggatcatcatccggaagacagaatatggttcacgactgcgaatccaggacctggacacgacagacactggctactacca

SEQ ID NO: 8136 - DNA, 535 bp, Homo sapiens
agctcgccgaggcgccgaggagagcgggccgccccacagcccgagccggagagggagcgcgagccgcgccggccccggtcgggcctccgaaaccatgaactttctgctgtcttgggtgcattggagccttgccttgctgctctacctccaccatgccaagtggtcccaggctgcacccatggcagaaggaggagggcagaatcatcacgaagtggtgaagttcatggatgtctatcagcgcagctactgccatccaatcgagaccctggtggacatcttccaggagtaccctgatgagatcgagtacatcttcaagccatcctgtgtgcccctgatgcgatgcgggggctgctgcaatgacgagggcctggagtgtgtgcccactgaggagtccaacatcaccatgcagattatgcggatcaaacctcaccaaggccagcacataggagagatgagcttcctacagcacaacaaatgtgaatgcagaccaaagaaagatagagcaagacaagaaaagtaagtggccctgacttta

SEQ ID NO: 8137 - DNA, 2116 bp, Homo sapiens; identical to SEQ ID NO: 5499

SEQ ID NO: 8138 - DNA, 1949 bp, Homo sapiens
actgctatctttaggttttctttttgcaggtgctccaaacatgcttcctttatttttatttttatttttttggaaacggagtctcgctttgttgcccaggctggagtccagtgataaccacctgcctcaaagataatctgctcaaaagacttccatttcattctccaccccaagaagctttagaaattttcttccttctcccagaatgtcctatgatgcatatttccaacaactgggagagccttgtggttccatttgcaaaggttgtttgtaaaatgagtgaccagtcttcactggttctggaagagtattgggcaactctgcaagaatccactttcagcaaactggtccagatgtttaaaacagccgtcatatgccagttggattactgggatgaaagtgctgaggagaatggtaatgttcaagctctcctagaaatgttgaagaagctgcacagggtaaaccaggtgaaatgtcaactacctgaaagtattttccaagtagacgaactcttgcaccgtctcaatttttttgtagaagtatgcagaaggtacttgtggaaaatgactgtggacgcttcagaaaatgtacaatgctgcgtcatattcagtcactttccatttatctttaataatctgtcgaaaattaaactactacatacagacacacttttaaaaatagagagtaaaaaacataaagcttatcttaggtcggcagcaattgaggaagaaagagagtctgaattcgctttgaggcccacgtttgatctaacagtcagaaggaatcacttgattgaggatgttttgaatcagctaagtcaatttgagaatgaagacctgaggaaagagttatgggtttcatttagtggagaaattgggtatgacctcggaggagtcaagaaagagttcttctactgtctgtttgcagagatgatccagccggaatatgggatgttcatgtatcctgaaggggcttcctgcatgtggtttcctgtcaagcctaaatttgagaagaaaagatacttcttttttggggttctatgtggactttccctgttcaattgcaatgttgccaaccttcctttcccactggcactgtttaagaaacttttggaccaaatgccatcattggaagacttgaaagaactcagtcctgatttgggaaagaatttgcaaacacttctggatgatgaaggtgataactttgaggaagtattttacatccattttaatgtgcactgggacagaaacgacacaaacttaattcctaatggaagtagcataactgtcaaccagactaacaagagagactatgtttctaagtatatcaattacattttcaacgactctgtaaaggcggtttatgaagaatttcggagaggattttataaaatgtgcgacgaagacattatcaaattattccaccccgaagaactgaaggatgtgattgttggaaatacagattatgattggaaaacatttgaaaaggtacatcatcaagtctaagttgattaaattcagttttccttcctatttcctcaataacttttttttgtattttctctagaatgcacgttatgaaccaggatataacagttcacatcccaccatagtgatgttttggaaggctttccacaaattgactctggaagaaaagaaaaaattccttgtatttcttacaggaactgacagactacaaatgaaagatttaaataatatgaaaataacattttgctgtcctgaaagttggaatgaaagagaccctataagagcactgacatgtttcagtgtcctcttcctccctaaatattctacaatggaaacagttgaagaagcgcttcaagaagccatcaacaacaacagaggatttggctgaccagcttgcttgtccaacagccttattttgttgttgttatcgttgttgttgttgttgttgttgttgtttctcta

SEQ ID NO: 8139 - DNA, 5069 bp, Homo sapiens
gtttcagatttgggatattggtgtttctgttttggagaaattattctttttctttttaatttgaagaaaaatcatcagtcttggaatacagaagagaaactagaaatatacgtattttgtttcacatttgaacagtcattcttgaggaatactccatacctgagtagacagccatgtggccatcgcagctactaattttcatgatgctcttagctccaataattcatggtggcaagcacagtgaacgacatcctgcccttgctgctccattgcgacacgctgagcgcagcccaggaggcgctcttccacccagacatctgcttcagcagccagctgcagagcgcaccgctgctcatcgtggacaagggccccgtggagctaccagaggagttcgcggtccaggtgcccaaggagcacagattgcagcgcaagctttcagccgtgccccaattccaatggctgtggtccgcagagagctatcctgtgagagctatcctatagagcttcgctgtccaggaacagacgtcatcatgatagaaagtgccaactatggcaggactgatgacaaaatttgtgactctgaccctgctcagatggagaatatccgatgttatctgccagatgcctataagattatgtctcaaagatgcaataacagaacccagtgtgcagtggtggcaggtcctgatgtttttccagacccgtgtccaggaacctataaataccttgaagtgcagtatgaatgtgtcccttacaaagtggaacaaaaagtttttctttgtcctggactactaaaaggagtataccagagtgaacatttgtttgagtccgaccaccaatctggggcgtggtgcaaagaccctctgcaggcatctgacaagatttattatatgccctggactccctacagaactgataccctgactgagtattcatccaaggatgacttcattgctggaagaccaactacaacctacaagctccctcacagggtggatggcacaggatttgtagtgtatgatggagctttgttcttcaacaaagagcgcaccaggaacatagtaaagtttgatttgcggactaggataaagagtggagaggctatcatagcaaatgccaattaccatgatacctccccttaccgatggggaggcaaatctgacatagacctggcagtagatgagaatgggctatgggtaatctatgcaacagaacaaaacaatggtaaaattgtcattagtcaattgaacccttacaccctacggatcgaaggaacatgggatactgcatatgataaaaggtcagcttccaatgcctttatgatttgtggaattctgtatgtggtcaaatctgtatatgaggatgatgacaatgaggctactggaaataagattgactacatttacaacactgaccaaagcaaggatagtttggtggatgtaccctttcctaattcataccagtacattgcagctgtggattacaaccccagggacaacctactttatgtatggaataactatcacgtcgtgaaatattctttggattttggacctctggatagtagatcagggcaggcacatcatggacaagtttcatacatttctccgccaattcaccttgactctgagctagaaagaccctctgttaaagatatctctaccacaggacctcttggcatgggaagcactaccaccagtaccacccttcggaccacaactttgagcccaggaaggagtaccaccccgtcagtgtcaggaagaagaaaccggagtactagtaccccatctccagctgtcgaggtacttgatgacatgaccacacaccttccatcagcatcgtcccaaatcccagctctcgaagagagctgtgaggctgtggaagcccgagaaatcatgtggtttaagactcgtcaaggacagatagcaaagcagccatgccctgcaggaactataggtgtatcaacttatctatgccttgctcctgatggaatttgggatccccaaggtccagatctcagcaactgttcttctccttgggtcaatcatataacacagaagttgaaatctggtgaaacagctgccaacattgctagagagctggctgaacagacaagaaatcacttgaatgctggggacatcacctactctgtccgggccatggaccagctggtaggcctcctagatgtacagcttcggaacttgaccccaggtggaaaagatagtgctgcccggagtttgaacaagcttcagaaaagagagcgctcttgcagagcctatgtccaggcaatggtcgagacagttaacaacctccttcagccacaagctttgaatgcatggagagacctgactacgagtgatcagctgcgtgcggccaccatgttgcttcatactgtggaggaaagtgcttttgtgctggctgataaccttttgaagactgacattgtcagggagaatacagacaatattaaattggaagttgcaagactgagcacagaaggaaacttagaagacctaaaatttccagaaaacatgggccatggaagcactatccagctgtctgcaaataccttaaagcaaaatggccgaaatggagagatcagagtggcctttgtcctgtataacaacttgggtccttatttatccacggagaatgccagtatgaagttgggaacggaagctttgtccacaaatcattctgttattgtcaattcccctgttattacggcagcaataaacaaagagttcagtaacaaggtttatttggctgatcctgtggtatttactgttaaacatatcaagcagtcagaggaaaatttcaaccctaactgttcattttggagctactccaagcgtacaatgacaggttattggtcaacacaaggctgtcggctcctgacaacaaataagacacatactacatgctcttgtaaccacctaacaaattttgcagtactgatggcacatgtggaagttaagcacagtgatgcggtccatgacctccttctggatgtgatcacgtgggttggaattttgctgtcccttgtttgtctcctgatttgcatcttcacattttgctttttccgggggctccagagtgaccgtaacaccatccacaagaacctctgcatcagtctctttgtagcagagctgctcttcctgattgggatcaaccgaactgaccaaccaattgcctgtgctgttttcgctgccctgttacatttcttcttcttggctgccttcacctggatgttcctggagggggtgcagctttatatcatgctggtggaggtttttgagagtgaacattcacgtaggaaatacttttatctggtcggctatgggatgcctgcactcattgtggctgtgtcagctgcagtagactacaggagttatggaacagataaagtatgttggctccgacttgacacctacttcatttggagttttataggaccagcaactttgataattatgcttaatgtaatcttccttgggattgctttatataaaatgtttcatcatactgctatactgaaacctgaatcaggctgtcttgataacatcaactatgaggataacagacccttcatcaagtcatgggttataggtgcaatagctcttctctgcctattaggattgacctgggcctttggactcatgtatattaatgaaagcacagtcatcatggcctatctcttcaccattttcaattctctacagggaatgtttatatttattttccattgtgtcctacagaagaaggtacgaaaagagtatgggaaatgcctgcgaacacattgctgtagtggcaaaagtacagagagttccattggttcagggaaaacatctggttctcgaactcctggacgctactccacaggctcacagagccgaatccgtagaatgtggaatgacacggttcgaaagcagtcagagtcttcctttattactggagacataaacagttcagcgtcactcaacagagagccctacagagagacaagtatgggagtaaagctaaacattgcatatcaaataggggcttctgaacaatgccagggatacaagtgtcatggatactctaccactgaatggtaaccatggcaatagttacagcattgccagcggcgaatacctgagcaactgtgtgcaaatcatagaccgtggctataaccataacgagaccgccctagagaaaaagattctgaaggaactcacttccaactatatcccttcttacctgaacaaccatgagcgctccagtgaacagaacaggaatctgatgaacaagctggtgaataaccttggcagtggaagggaagatgatgccattgtcctggatgatgccacctcgtttaaccacgaggagagtttgggcctggaactcattcatgaggaatctgatgctcctttgctgcccccaagagtatactccaccgagaaccaccagccacaccattataccagaaggcggatcccccaagaccacagtgagagctttttccctttgctaaccaacgagcacacagaagatctccagtcaccccatagagactctctctataccagcatgccgacactggctggtgtggccgccacagagagtgttaccaccagcacccagaccgaacccccaccggccaaatgtggtgatgccgaagatgtttactacaaaagcatgccaaacctaggctccagaaaccacgtccatcagctgcatacttactaccagctaggtcgcggcagcagtgatggatttatagttcctccaaacaaagatgggacccctcccgagggaagttcaaaaggaccggctcatttggtcactagtctatagaagatgacacagaaattggaaccaacaaaactgctaacaccttgttgactgttctgagttgatataagcagtggtaataatgtgtgtactcctaaatctttatgctgtcctctaaagacaaacacaaactctcagacttttttttttttaatgggatttttaggtcagcccaggggagaaagataactgctaaaattcccctgtaccccatcctttcttgtcctttcccc

SEQ ID NO: 8140 - DNA, 580 bp, Homo sapiens
gagctgccagagtaaagcaaagagaaaggaagcaggcccgttggaagtggttgtattagaagacctgcgagtaaaactgaagaaagaaggatattctaatatttcttatattgttgttaatcatcaaggaatctcttctcgattaaaatacacacatcttaagaataaggtttcagagcatattcctgtttatcaacaagaagaaaaccaaacagatgtctggactcttttaaatggaagcaaagatgacttcctcatatatgataggtttgtacatacacacaaacacatcccaaatttaaaaataactgtttcgtatctatttatttacttcccatcacacataacaatcttctttactgttaaatacaatgccatatttcagtcttcatctcatataatctctctttaacatttagaagtaaaaatcactccttatttttgaaatactctcattttaaaaaatttctatgacactataccctgctggttttcctcatatccttcctcttctttctcctcctccacacttcctcctcttccacctcctgatttttcttcctcccacattcttccttgg

SEQ ID NO: 8141 - DNA, 479 bp, Homo sapiens
aggatccttccagctgaacaaagtcagccacaaagcagactagccagccggctacaattggagtcagagtcccaaagacatgggcttgttagagtgctgtgcaagatgtctggtaggggccccctttgcttccctggtggccactggattgtgtttctttggggtggcactgttctgtggctgtggacatgaagccctcactggcacagaaaagctaattgagacctatttctccaaaaactaccaagactatgagtatctcatcaatgtgtaagtacctgccctcccacacagacccatcttttttttccctctctccatcctggagatagagaactcttcagtaccttagtaactagcaggggactggggtggagccagaccggattcccgagtcttccctctgtgcagatctctcctgctccacattcgaagcccattcagaaaggaggggtctgcctgcctgcctgtcagcccct

SEQ ID NO: 8142 - DNA, 583 bp, Homo sapiens
attgtctgaggcaaaaagacatcaagtcctttcatgctgtcctgggaaaggcggtttggaacaagttatcctgattctagagacaggggattcaacttcaatttttctgcagtggctctgggtccagccccttacttaaagatctggaaagcatgaagactgggctttttttcctatgtctcttgggaactgcagctgcaatcccgacaaatgcaagattattatctgatcattccaaaccaactgctgaaacggtagcacctgacaacactgcaatccccagtttaagggctgaagctgaagaaaatgaaaaagaaacagcagtatccacagaagacgattcccaccataaggctgaaaaatcatcagtactaaagtcaaaagaggaaagccatgaacagtcagcagaacagggcaagagttctagccaagagctgggattgaaggatcaagaggacagtgatggtcacttaagtgtgaatttggagtatgcaccaactgaaggtacattggacataaaagaagatatgagtgagcctcaggagaaaaaactctcagagaacactgattttttggctcctgg

SEQ ID NO: 8143 - DNA, 440 bp, Homo sapiens
caggcttcatatggggagaaattaaacagatgtgggatggcggacttcaggactacatccatgattggtggaatctaatggactttgtaatgaactccttatatttagcaacaatctccttgaaaattgttgcatttgtaaagtgcccttaatccacgagaatcatgggacatgtggcatcccactctggtggcagaggctttatttgctattgcaaacatcttcagttctctgcgtctgatctcactgtttactgcaaattctcacctgggacctctgcaaatatctctgggaagaatgctcctggacattttgaagtttctattcatatactgccttgtgttgctagcatttgcaaatggcctaaatcaattgtacttctattatgaagaaacgaaagggttaacctgcaaaggcataagatgtgaaaagcagaataa

SEQ ID NO: 8144 - DNA, 993 bp, Homo sapiens
ctcggacgacctgctgagcctcccaaaccgcttccataaggctttgcctttccaacttcagctacagtgttagctaagtttggaaagaaggaaaaaagaaaatccctgggccccttttcttttgttctttgccaaagtcgtcgttgtagtctttttgcccaaggctgttgtgtttttagaggtgctatctccagttccttgcactcctgttaacaagcacctcagcgagagcagcagcagcgatagcagccgcagaagagccagcggggtcgcctagtgtcatgaccagggcgggagatcacaaccgccagagaggatgctgtggatccttggccgactacctgacctctgcaaaattccttctctaccttggtcattctctctctacttggggagatcggatgtggcactttgcggtgtctgtgtttctggtagagctctatggaaacagcctccttttgacagcagtctacgggctggtggtggcagggtctgttctggtcctgggagccatcatcggtgactgggtggacaagaatgctagacttaaagtggcccagacctcgctggtggtacagaatgtttcagtcatcctgtgtggaatcatcctgatgatggttttcttacataaacatgagcttctgaccatgtaccatggatgggttctcgtaagttctcaatgagattcttgatggcagaaaattgaatatctggtagtggtaaaggatgaaaatgctttgaagctatttttttttttggccagtgtgaccttttaatattgatttctgtgtctactgtaatatcccctatagtttgttttgttgttgttttgcccacaacaggcactcattaagtattgtttgaatttaaattttgtcctattggtttctaatggcatttctaagagtttactatagaattcagttgtttgttttcagctttttagtgacctatactttgtttgtgctatttaataaatgttatccatatcta

SEQ ID NO: 8145 - DNA, 548 bp, Homo sapiens
acttctgataagctccaatgtgtgtttaatgaatacaaagccgcggtctgggtgccgcctcggccgcggccgctctcccgcgctcctttgccagaagctggcggagagaatttacatttaaagattagcagagtgagaaagagaaatctgccttttgttgtgtggggtgaggaggaggcatctacccctggccttgacgctatctcccatcacctctgctatccagacaggactcaccgagtatcaaatgataagaactgagcacactggatgaaataatacttgcactgggagcactaagaaaagattgatctctgggctggtgaacataatctctgtcccagtcagaaaaggagagaggaaattagcagagcgattggtggagaatgatatctgtcaaaagaaacacttggagagcactgagtttagtaataggtgactgccggaaaaaagggaactttgaatattgtcaagatcgtactgagaagcactccacaatgccagactcacctgtggatgtgaagacgcaatctaggctgactcctcca

SEQ ID NO: 8146 - DNA, 1751 bp, Homo sapiens
ctcttttgccggtattcagtgaagaaagcaagtctaaatatgcagttctctcactggagtgaaagatgttttgttcatttctaatcaactatgctagacagctgcaagctgaaaagtgcctgcaatttgccatttatttgtaataagaagtttttagaagtaagataatacacaagaacctcaaccctgtgtgggaagaaaaagcttgtattctggttgatcatcttagggagccattgtatataaaggtatttgactatgattttggactacaggatgactttatgggctcagcctttctggatctgacacaattggagttaaacaggcccacagatgtgacccttactctgaaagatcctcattatcctgaccatgatcttggaatcattttgctctcagtcatccttacccctaaagaaggagagtccagggatgtgacaatgctaatgaggaagagttggaaaagatcaagtaaggaactttcagaaaatgaagtggttggatcttatttctctgtgaagtctctcttttggaggacgtgcggcaggccagctcttcctgtcctgggcttctgcagagcagagcttcagaatccttattgcaaaaatgtacaatttcagacccaaagtttacgcctatcagacctacacagaaaatcgcatctttggagaggaatagtcagcatcaccttgattgaagggagagacctcaaggccatggattccaacgggttgagcgatccctacgtgaagttccggcttgggcatcagaagtacaagagcaagattatgccaaaaacgttgaatcctcagtggagggaacaatttgattttcacctttatgaagaaagaggaggagtcattgatatcactgcatgggacaaagatgctgggaaaagggatgatttcattggcaggtgccaggtcgacctgtcagccctcagtagggaacagacgcacaagctggagttgcagctggaagagggtgagggacacctggtgctgctggtcactctgacagcatcagccacagtcagcatctctgacctgtctgtcaactccctggaggaccagaaggaacgagaggagatattaaagagatatagcccattgaggatatttcacaacctgaaagatgtgggatttctccaggtgaaagtcatcagagcggaagggttaatggctgccgacgtcactggaaaaagtgacccattttgtgtggtagaactgaacaacgatagactgctaacacatactgtctacaaaaatctcaatcctgagtggaataaagtcttcacgttcaacattaaagatatccattcagttcttgaagtgacagtttatgatgaagatcgggatcgaagtgctgactttctgggcaaagttgctataccattgctgtctattcaaaatggtgaacagaaagcctacgtcttgaaaaacaagcagctgacagggccaacaaagggggtcatctatcttgaaatagatgtgatttttaatgctgtgaaagccagcttacgaacattaatacccaaagaacagaagtacattgaagaggaaaacagactctctaaacagctgctactaagaaactttatcagaatgaaacgttgtgtcatggtgctggtaaatgctgcatactacgttaatagttgctttgattgggattcacccccaaggagtctcgctgcttttgtgctctttctctttgttgtctggaactttgagctctacatgataccactg

SEQ ID NO: 8147 - DNA, 576 bp, Homo sapiens
aacagtgagggttattggtaagaggagagcccgtgtcattcctcactataatgctttctctctgctttggatgtaccgataattgcagttcagggttcctggaacttctaccagtgccactctgacaggcctcaccagaggtgccacctacaacgtcatagtggaggcactgaaagaccagcagaggcataaggttcgggaagaggttgttaccgtgggcaactctgtcaacgaaggcttgaaccaacctacggatgactcgtgctttgacccctacacagtttcccattatgccgttggagatgagtgggaacgaatgtctgaatcaggctttaaactgttgtgccagtgcttaggctttggaagtggtcatttcagatgtgattcatctagtgagtagttgctttgtccatccacttccgtgtttgtctcctcaagttccatgcatgcactcatgtgccaaggaagcatgtttggaagacacaggttcttccaaacatgaagcaaacaagagaatactgtttgactcgaagtaatattttgcatcatagaaaaatgatgggaaattttacttgt

SEQ ID NO: 8148 - DNA, 867 bp, Homo sapiens
ttactactgatgtgaacagattctgacctttggctgcctagttgtttttgataaattaactcttagaataatgatgaatgtcttggccgttcctcaaaaacctttggctgtttgcagcagatgatggatgtctagaaaacacccctgacactgcagagttcagtcgagagttccagttgcaccagcatctctttgatccggaacatgactatccaggcttgggcaagtggaacaagaaactcctttacgagaagatgaagggaggagagagacgaaagcggaggagtgtcaatccatatctacaaggacagagactggataatgttgttgcaaagaagtctgtcccccatttttcagatgaggataaggatccagagtaaagagaagatgctagacgaaaacccacattacctgttaggcctcagcatggcttatgtgcacgtgtaaatggagtccctgtgaatgacagcatgtttcttacatagataattatggatacaaagcagctgtatgtagatagtgtattgtcttcacaccgatgattctgctttttgctaaattagaataagagcttttttgtttcttgggtttttaaaatgtgaatctgcaatgatcataaaaattaaaatgtgaatgtcaacaataaaaagcaagactatgaaaggctcagatttcttgcagtttaaaatggtgtctgaggttgtactattttggccaagtctgtagaaagctgtcatttgattttgattatgtagttcatccagcccttgggcattgttatacaccagtaaagaaggctgtactcaagaggaggagctgacacatttcacttggctgcgtcttaataaacatgaatgcaagcattgg

SEQ ID NO: 8149 - DNA, 2097 bp, Homo sapiens
tgagaagggcaaatgctatcattggaaaaactgacaaaagtcccaataggaaaaataaggaagtggagagttactatgtttctaatttttcatgtgcttctatttttttcctacttcagagccattgactaatagttgagtataacacaggttgtgtttccgggctgctgaaacatgacactaatattttcaaagaactgtggaagcctaaaaggaagccaatgagaaataactaaatgagagtttaggactgcagccttcattttcattcaaagatttaaaagtttccataaagtaaaatgttcttctccggccacctgttttcatagttctgtgttttccttcaggcctttctggcttcctatatggcagtaagaaaatgatgtgcttaatgattacaaatttcatatggaatacgaactttcagtttgtacatatgatgcacagagatgcttttgtggttttattggttttcatattacaaacaaagaaactagaaaatgaaaccattccaaaagtggaagtaatttctcactgcccctgtgataaactgtggtcactggctgtggcagcaactattataagatgctctgaaaactcttcagacactgaggggcaccagaggagcagactacaagaatggcacacgctatggaaaactcctggacaatcagtaaagagtaccatattgatgaagaagtgggctttgctctgccaaatccacaggaaaatctacctgatttttataatgactggatgttcattgctaaacatctgcctgatctcatagagtctggccagcttcgagaaagagttgagaagttaaacatgctcagcattgatcatctcacagaccacaagtcacagcgccttgcacgtctagttctgggatgcatcaccatggcatatgtgtggggcaaaggtcatggagatgtccgtaaggtcttgccaagaaatattgctgttccttactgccaactctccaagaaactggaactgcctcctattttggtttatgcagactgtgtcttggcaaactggaagaaaaaggatcctaataagcccctgacttatgagaacatggacgttttgttctcatttcgtgatggagactgcagtaaaggattcttcctggtctctctattggtggaaatagcagctgcttctgcaatcaaagtaattcctactgtattcaaggcaatgcaaatgcaagaacgggacactttgctaaaggcgctgttggaaatagcttcttgcttggagaaagcccttcaagtgtttcaccaaatccacgatcatgtgaacccaaaagcatttttcagtgttcttcgcatatatttgtctggctggaaaggcaacccccagctatcagacggtctggtgtatgaagggttctgggaagacccaaaggagtttgcagggggcagtgcaggccaaagcagcgtctttcagtgctttgacgtcctgctgggcatccagcagactgctggtggaggacatgctgctcagttcctccaggacatgagaagatatatgccaccagctcacaggaacttcctgtgctcattagagtcaaatccctcagtccgtgagtttgtcctttcaaaaggtgatgctggcctgcgggaagcttatgacgcctgtgtgaaagctctggtctccctgaggagctaccatctgcaaatcgtgactaagtacatcctgattcctgcaagccagcagccaaaggagaataagacctctgaagacccttcaaaactggaagccaaaggaactggaggcactgatttaatgaatttcctgaagactgtaagaagtacaactgagaaatcccttttgaaggaaggttaatgtaacccaacaagagcacattttatcatagcagagacatctgtatgcattcctgtcattacccattgtaacagagccacaaactaatactatgcaatgttttaccaataatgcaatacaaaagacctcaaaatacctgtgcatttcttgtaggaaaacaacaaaaggtaattatgtgtaattatactagaagttttgtaatctgtatcttatcattggaataaaatgacattcaataaataaaaa

SEQ ID NO: 8150 - DNA, 504 bp, Homo sapiens
taaaatcacagataaaataagttcctatggtgaggaatggaggcctccagctgacagagagcaaagaactgaggcctgcgacaactataggcgtgatcctgggaaccgattctcaacctcatctgagccttgagacgactgctgctctggccgacagcctgacggcaacctcctgagacagctctgagaggagattttccaggttcaagtcccgagacgaggtttcaccgtgctggccaagctggtctccacctcaggtgatctgccccgctaagcctccgcaagtgctgggattacaggctagtgcaaatcttcaggggccgtccaggactacagagctgtttcaccctaccttggcttcaatctcttcccccatgctcgaaggtgcggagctgtacttcaacgtggaccatggctacctggagggcctggttcgaggatgcaaggccagcctcctgacccagcaagactatatcaacctggtccagtgtgagaccctagaag

SEQ ID NO: 8151 - DNA, 565 bp, Homo sapiens
gtgcccgctcgggctgctgcggctggggcttgcttccttatacccacctctcctcctctgggtctgcgtgtgtatgctcaaggtgtcagccgtactgtgtgtgtgtgcagccgcttggtgcagtcagtctctcgcagctgccgcggcggtggctgcagccggggggcggtcggacggcggtaattttctggatgataaacaatggctcaccacaatctctcagtatgacaaggaagtcggacagtggaacaaattccgagacgatgattatttccgcacttggagtccaggaaaacccttcgatcagggatgaaagaagcaggagtagaccataggcagtggaggggtcccatattatccacctgcaagcagtgcccagtggtctatcccagccctgtttgtggttcagatggtcatacctactcttttcagtgcaaactagaatatcaggcatgtgtcttaggaaaacagatctcagtcaaatgtgaaggacattgcccatgtccttcagataagcccaccagtacaagcagaaatgttaagagagcatgcagtgacctggagt

SEQ ID NO: 8152 - DNA, 710 bp, Homo sapiens
aatgccttcaacccttcctgcagaaactataaggagctgctgctgtgaagtctaagatttgatgactgcttcaagggttagttttcacttcttggaaagaggaagtcaccatggcttttgcctctggacctttccaacctcacaaaccgaaacatttgtacttcactacttcttgcctttgaccagctatagatggatacattggaaccattcggggatgaattcagcggaatggccagatgcccatatgatgccaaacatgccaacgttgcactgtttgcagatggaaaactatactcagccacagtgactgacttccttgccattgacgcagtcatttaccggagtcttggagaaagccctaccctgcggaccgtcaagcacgattcaaaatggttgaaagaaccatactttgttcaagccgtggattacggagattatatctacttcttcttcagggaaatagcagtggagtataacaccatgggaaaggtagttttcccaagagtggctcaggtttgtaagaatgatatgggaggatctcaaagagtcctggagaaacagtggacgtcgttcctgaaggcgcgcttgaactgctcagttcctggagactctcatttttatttcaacattctccaggcagttacagatgtgattcgtatcaacgggcgtgatgttgtcctggcaacgttttctacaccttataacag

SEQ ID NO: 8153 - DNA, 676 bp, Homo sapiens
gaatatacaaataactttttggtcctgactttccccacccctacaggatggtgccatgacaatggtgtgaactacaagattggagagaagtgggaccgtcagggagaaaatggccagatgatgagctgcacatgtcttgggaacggaaaaggagaattcaagtgtgaccctcatgaggcaacgtgttatgatgatgggaagacataccacgtaggagaacagtggcagaaggaatatctcggtgccatttgctcctgcacatgctttggaggccagcggggctggcgctgtgacaactgccgcagacctgggggtgaacccagtcccgaaggcactactggccagtcctacaaccagtattctcagagataccatcagagaacaaacactaatgttaattgcccaattgagtgcttcatgcctttagatgtacaggctgacagagaagattcccgagagtaaatcatctttccaatccagaggaacaagcatgtctctctgccaagatccatctaaactggagtgatgttagcagacccagcttagagttcttctttctttcttaagccctttgctctggaggaagttctccagcttcagctcaactcacagcttctccaagcatcaccctgggagtttcctgagggttttctcataaatgagggctgcacattgc

SEQ ID NO: 8154 - DNA, 853 bp, Homo sapiens
aacgaggatgccactcagagagaccagagggacaaacaccacagccagtcctgccacagccctgccacaaaaaacctgtgaacttatgaatcaaggcatcttggccctggtcagctccattggctgcacgtcagcaggatccctccagtctttggcagacgccatgcatatcccccacctcttcattcagcgctcaacagctgggaccccaaggagtggctgtggactcacccggagcaacaggaatgatgactacactctctcagttcgcccacctgtctacttgcatgatgttatcctaagagtggtcacagagtatgcctggcagaaattcattatattctatgatagtgaatacgatatccgtggaatacaggagttcttggacaaagtctctcagcagggaatggatgttgcacttcagaaggtagaaaacaacatcaataaaatgattaccactctctttgacaccatgagaatagaagaactgaatcgctatcgagacactcttaggcgagcgatccttgttatgaatcctgctacagccaaatccttcattactgaggaaacttcattatgcagtttaaagacaaattatacacattttactttttgagttcagcaaatgacttagagaatcttattgaactactacattttttcataatataaaatatttccaattttaaagaagttgggtctttccttcaagaaacacaaatctggaagatgggagtgagtacacagaggatgtaatataaattaggatgttaaaattgcaatagaggcggttgaagcatctatggtcatttttgttggaggagatcagagaaaacctcactgagcaggtata

SEQ ID NO: 8155 - DNA, 1308 bp, Homo sapiens
atttcctcccagcctcgtgcgggaaatggctttaattctgacggcagggctgtgagggactagcgggaacccgagccttttgtcaaggaactgcggcgtcggtggccagtcatccccgccgccgcggagccgctgcactgctgggggatctcccagcagctctgacgagcgcgggctgcagcatgggcagaaaacgctgccctgcagattagctgggtggattttttaagcgcaccccaccccccaaacccataaaataacaaaaccaacccgcagtggccgaccggagatagctaagatgccgcgcaggagtttccacctggatgtttgaggttgtgtagatgtggccggcacccttgagagtggagctagggggtgcagactgagcagtgaacagaaggagccttggacagggctgggccagcctcccgagttccaggagcgaattgcaaacccaccgggaaaatgagcgaagagacggtccccgaggctgcctcgccgccgcccccgcaggggcagccttactttgaccgcttctcagaggacgaccccgagtacatgcgccttcgcaaccgggcggcggacctgcggcaggacttcaacctgatggagcagaagaagcgcgtcaccatgatcctgcagagtccctctttcagggaggagctggaaggcctcatccaggagcagatgaagaaggggaacaactcctccaacatctgggccctgcgacagatcgcggacttcatggccagcacctcccacgcagtcttcccgacatcttccatgaatgtctccatgatgacgcctatcaatgacctccacacagctgactccctgaacctggccaaaggggagcggctcatgcggtgcaagatcagcagtgtctaccgactcctggacctctatggctgggcccagctgagtgacacctatgtcacgttgagagtcagcaaggagcaggaccacttcctgatcagccctaagggagtttcttgcagtgaagtcacagcgtccagcctggtgagtgaagtactggagatgaggaacaagattcgagaacaaaaccgacaagatgtgaagtcagcggggcctcagtcccagctcctggcgagcgtcattgccgagaagagccgaagcccgtctacagagagccagctgatgtccaagggagacgaggataccaaagacgattcagaggagacggtgcccaaccccttcagccaactcactgaccaggagttggaggagtacaagaaagaggtggagaggaagaaactagaacttgatgctcctggctggttctcttca

SEQ ID NO: 8156 - DNA, 724 bp, Homo sapiens
agatgcacaggaggagaagcaggagctgtcgggaagatcagaagccagtcatggatgaccagcgcgaccttatctccaacaatgagcaactgcccatgctgggccggcgccctggggccccggagagcaagtgcagccgcggagccctgtacacaggcttttccatcctggtgactctgctcctcgctggccaggccaccaccgcctacttcctgtaccagcagcagggccggctggacaaactgacagtcacctcccagaacctgcagctggagaacctgcgcatgaagcttcccaagcctcccaagcctgtgagcaagatgcgcatggccaccccgctgctgatgcaggcgctgcccatgggagccctgccccaggggcccatgcagaatgccaccaagtatggcaacatgacagaggaccatgtgatgcacctgctccaggtgagtgcagggagctagctgggtggtcctgcctgcccacccaggaccctggccgggccaagctccaaggcctgtatacctggctcatggcagactttcaacatgtgctctctggattactgaatacaagggtgacccttaaatgttatatgtagtctggcctctgcatttttgagataaacaggctcggctgggtgcagtggctcatgcctgtaatctcagcactttgggaggcctaggcaggcagatcacctgaggccaggagttcgagaccagcctgg

SEQ ID NO: 8157 - DNA, 1004 bp, Homo sapiens
atagatgtatttcagtaattagattaattgcaattctctatatttttgcagttttgttttataacatgagtttggatgtgaacagaaaggcagagtctccaccaagattctatttctcttctaatggaacttctgacgtgattacaggaagcatacaggtgtccagcagagaagctaactgtagaacacatcaagcatttatgcggaaagatgtgcgggacatcctcaccccaattcagattgaagctgcttaccaccttggtcctcatgtcatcagtaaacgaagtacagaggaattcccaccacttcagccaattcttcagcagaagaaagaaaaagacataatgaaaaaaacaataaactttgcaaggttttgtgcccatgaaaattgttctgctgatttacaggtttctgcaaagattgggtttttgaagccccatgaaaataaaacatatcttgctgttgggagtatgaagacattgatgttgaatgtgtccttgtttaatgctggagatgatgcatatgaaacgactctacatgtcaaactacccgtgggtctttatttcattaagattttagagctggaagagaagcaaataaactgtgaagtcacagataactctggcgtggtacaacttgactgcagtattggctatatatatgtagatcatctctcaaggatagatattagctttctcctggatgtgagctcactcagcagagcggaagaggacctcagtatcacagtgcatgctacctgtgaaaatgaagaggaaatggacaatctaaagcacagcagagtgactgtagcaatacctttaaaatatgaggttaagctgactgttcatgggtttgtaaacccaacttcatttgtgtatggatcaaatgatgaaaatgagcctgaaacgtgcatggtggagaaaatgaacttaactttccatgtaagaaaagttaattgtgttaatatttgtaacaacctaaaaggatgtcactgatgcattgct

SEQ ID NO: 8158 - DNA, 692 bp, Homo sapiens
agcccatgtctcatgaactaccctgtggccatactcagacagtccaggcacattatattctgaatggaggcaccctgctggggctgaagaagctctccttctattatctgataatggcaaagggaggcattgtccgaactgggactcatggactgcttgtgaagcaggaagacatgaagggccatttttccatctcaatccctgtgaagtcagacattgctcctgtcgctcggttgctcatctatgctgttttacctaccggggacgtgattggggattctgcaaaatatgatgttgaaaattgtctggccaacaaggtggatttgagcttcagcccatcacaaagtctcccagcctcacacgcccacctgcgagtcacagcggctcctcagtccgtctgcgccctccgtgctgtggaccaaagcgtgctgctcatgaagcctgatgctgagctctcggcgtcctcggtgagttcctggcagcctcaggaatcaagaagggccgtgccaggggctcagagcaaggaaaaatgactggataagtaggataagatcaattaaaattatatttatctaggaattaattgctttgagctctcttgtgggctttcattggtaaggaattatatatatatatatatataactactcacttctgcagttaaaaaaataaacaaaatacaatatattgaa

SEQ ID NO: 8159 - DNA, 784 bp, Homo sapiens
gcgcgagccgcgccggccccggtcgggcctccgaaaccatgaactttctgctgtcttgggtgcattggagccttgccttgctgctctacctccaccatgccaagtggtcccaggctgcacccatggcagaaggaggagggcagaatcatcacgaagtggtgaagttcatggatgtctatcagcgcagctactgccatccaatcgagaccctggtggacatcttccaggagtaccctgatgagatcgagtacatcttcaagccatcctgtgtgcccctgatgcgatgcgggggctgctgcaatgacgagggcctggagtgtgtgcccactgaggagtccaacatcaccatgcagattatgcggatcaaacctcaccaaggccagcacataggagagatgagcttcctacagcacaacaaatgtgaatgcagaccaaagaaagatagagcaagacaagaaaaaaaatcagttcgaggaaagggaaaggggcaaaaacgaaagcgcaagaaatcccggtataagtcctggagcgtgtacgttggtgcccgctgctgtctaatgccctggagcctccctggcccccatccctgtgggccttgctcagagcggagaaagcatttgtttgtacaagatccgcagacgtgtaaatgttcctgcaaaaacacagactcgcgttgcaaggcgaggcagcttgagttaaacgaacgtacttgcagatgtgacaagccgaggcggtgagccgggcaggaggaaggagcctccctcagggtttcgggaaccagatc

SEQ ID NO: 8160 - DNA, 587 bp, Homo sapiens
acttatgtgctgcctgttaactgtgcctgtgttggctgtttattcaactttatttctggattagatgcatatttcataatgaattgggttcagggatgatcactttcaagctgcaggcaatggtcgagacagttaacaacctccttcagccacaagctttgaatgcatggagagacctgactacgagtgatcagctgcgtgcggccaccatgttgcttcatactgtggaggaaagtgcttttgtgctggctgataaccttttgaagactgacattgtcagggagaatacagacaatattaaattggaagttgcaagactgagcacagaaggaaacttagaagacctaaaatttccagaaaacatgggccatggaagcactatccagctgtctgcaaataccttaaagcaaaatggccgaaatggagagatcagagtggcctttgtcctgtataacaacttgggtccttatttatccacggagaatgccagtatgaagttgggaacggaagctttgtccacaaatcattctgttattgtcaattcccctgttattacggcagcaataaacaaagagttcagtaacaag

SEQ ID NO: 8161 - DNA, 927 bp, Homo sapiens
ggacagagacgctggctaggtaagataaggaggcaagatgtgtgagcagcatccaaagaggcctgggcttcagttgtggagagggagagagccaggttggaatgggcagcaggtagggagatccctggggaggagctgaagcccatttggcttcagtgtcccccaaacccccaccaccctcttcctaggccgccctccccactgttaccaacatgaagctgctcgcagcaactgtgctactcctcaccatctgcagccttgaaggtgggtgtgatatggagagggggccaaaagggagaatgtgctggtggttatagctacctatctgcctgtgctcttatatccaggtctggcaaccaaagggctcaaaaggaagatcattccctctctaaagcccagaaagcccatccaaagatctggctggatacctttttggggagggggcagagagctggggtgggtactggcagaggtatggcaggaggccaggattcactgctgtggacccagctgaaaagagtgtgtgtgtgtgtgtgtgtgtgtgtgtgtgtgtgtgtgggcaggagctttggttcggagacaggcaaaggagccatgtgtggagagcctggtttctcagtacttccagaccgtgactgactatggcaaggacctgatggagaaggtcaagagcccagagcttcaggccgaggccaagtcttactttgaaaagtcaaaggagcagctgacacccctgatcaagaaggctggaacggaactggttaacttcttgagctatttcgtggaacttggaacacagcctgccacccagtgaagtgtccagaccattgtcttccaaccccagctggcctctagaacacccactggccagtcctagagctcctgtccctacccactctttgctacaataaatgctgaatgaatcca

SEQ ID NO: 8162 - DNA, 746 bp, Homo sapiens
atatatctcaccttctttctaaccttttcttatgtgcttttagggcccaccctggtcattacagaatattgttgctatggtgatcttttgaattttttgagaagaaaacgtgattcatttatttgttcaaagcaggaagatcatgcagaagctgcactttataagaatcttctgcattcaaaggagtcttcctgcagcgatagtactaatgagtacatggacatgaaacctggagtttcttatgttgtcccaaccaaggccgacaaaaggagatctgtgagaataggctcatacatagaaagagatgtgactcccgccatcatggaggatgacgagttggccctagacttagaagacttgctgagcttttcttaccaggtggcaaagggcatggctttcctcgcctccaagaattgtattcacagagacttggcagccagaaatatcctccttactcatggtcggatcacaaagatttgtgattttggtctagccagagacatcaagaatgattctaattatgtggttaaaggaaacgtgagtacccattctctgcttgacagtcctgcaaaggatttttagtttcaactttcgataaaaattgtttcctgtgattttcataatgtaaatcctgtctagggatatcacacattttagcagtcaaattaagtatacttcagcaaaatttgcatggtatgctgaacattactacaactaacattcaataatagaagtcctaattctaa

SEQ ID NO: 8163 - DNA, 558 bp, Homo sapiens
aagtttttaagcatggtatctagacaaggcaactcacatgacaataagacacaaaactttctcactcaagatagcaggtttggtttggtttgatttttaactcaagtttgatagtgtgaccaacatcatgttaggccttgtgagagacagaagttgggaagaaacaccccccacccccctccacacacacacggacacacacggtccctgccctcaaggacttccagtctagtaagtaagtggcaacagctacagtacaatccaggtcagcgaaaaatggagcctaaaacagagcaaagaaagacgcagggtacgattttatgaaggctctgagttggtggctgactctggcgtcaccatagacaccacaatgcgtggaggccgacttggcgttttctgcttctctcaagaaaacatcatctggtccaacctcaagtatcgctgcaatgacaccatccctgaggacttccaagagtttcaaacccagaatttcgaccgcttcgataattaaaccaaggaagcaatctgtaactgcttttcggaacactaaaaccatat

SEQ ID NO: 8164 - DNA, 1351 bp, Homo sapiens
gagcgggcgagcggcgcgggcggccggagcgccgaggcccggccatggccaccaccagcaccacgggctccaccctgctgcagcccctcagcaacgccgtgcagctgcccatcgaccaggtcaactttgtagtgtgccaactctttgccttgctagcagccatttggtttcgaacttatctacattcaagcaaaactagctcttttataagacatgtagttgctacccttttgggcctttatcttgcacttttttgctttggatggtatgccttacactttcttgtacaaagtggaatttcctactgtatcatgatcatcataggagtggagaacatgcacaattactgctttgtgtttgctctgggatacctcacagtgtgccaagttactcgagtctatatctttgactatggacaatattctgctgatttttcaggcccaatgatgatcattactcagaagatcactagtttggcttgcgaaattcatgatgggatgtttcggaaggatgaagaactgacttcctcacagagggatttagctgtaaggcgcatgccaagcttactggagtatttgagttacaactgtaacttcatggggatcctggcaggcccactttgctcttacaaagactacattactttcattgaaggcagatcataccatatcacacaatctggtgaaaatggaaaagaagagacacagtatgaaagaacagagccatctccaaatactgcggttgttcagaagctcttagtttgtgggctgtccttgttatttcacttgaccatctgtacaacattacctgtggagtacaacattgatgagcattttcaagctacagcttcgtggccaacaaagattatctatctgtatatctctcttttggctgccagacccaaatactattttgcatggacgctagctgatgccattaataatgctgcaggctttggtttcagagggtatgacgaaaatggagcagctcgctgggacttaatttccaatttgagaattcaacaaatagagatgtcaacaagtttcaagatgtttcttgataattggaatattcagacagctctttggctcaaaagggtgtgttatgaacgaacctccttcagtccaactatccagacgttcattctctctgccatttggcacggggtatacccaggatattatctaacgtttctaacaggggtgttaatgacattagcagcaagagctaattttctgaaggagagataaaaactgagttaaataaagatgatcagaatggatgagaaataactttagacattatttcattgaaccttcccaactgaaattattttatgatgttataacat

SEQ ID NO: 8165 - DNA, 615 bp, Homo sapiens
ctaccccaattatttactgggcaaaggaagatggaatgctacccaaaaacaggacagtttataagaactttgagaaaaccttgcagatcattcatgtttcagaagcagactctggaaattaccaatgtatagcaaaaaacgcattaggagccatccaccataccatttctgttagagttaaagcggctccatactggatcacagcccctcaaaatcttgtgctgtccccaggagaggatgggaccttgatctgcagagctaatggcaaccccaaacccagaattagctggttaacaaatggagtcccaatagaaagtaagttgccttgagtggttctaattgcagtatattttcagagcatatatacatcccgacagtgaataaatggtgataaaaaaataactcaggttaaggaaggaagccacatgtatgttaaacacaggcaccaaattacctttgcattttattaccattagatatttattatgaatgtgaatagtttatgctgttaacataatggcatgtgatgactggtacttggcaatatttcgtctgctttttacatggataatgggaagaatgacagggtcagaaataaatatcacttcaaagttt

SEQ ID NO: 8166 - DNA, 574 bp, Homo sapiens
gcagttttcttctcatattccttgcctcctgttattttgcatgtactaaaatataaatgtatttattgaggatagagcacctgcctggatctggtgcatgcataaataccattgaatttcatctgcactgtaattctacaagtttggatttatcattggtattcagagacaggtatcttggacataatggactctatggagtgaatggatgagtgatcccagctatcggcaggaccctcatcccccgttactttagcactgtgtttgaaggaggggtgaccgacctgtattacattctcaaacactcgaaagagtcataccacaactcatccatcacggtggactgcgaccagtgtaccatggtcacccagcacgggaagcccatgtttaccaaggtatgtacagaaggcagactgatcttggagttcacctttgatgatctcatgagaatcaaaacatggcactttaccattagacaataccgagagttagtcccgagaagcatcctagccatgcatgcacaagatcctcaggtcctggatcagctgtccaaaaacatcaccaggatggggct

SEQ ID NO: 8167 - DNA, 812 bp, Homo sapiens
gggaccgacggctgcagagagagactgagacgcagggatggaggggagggggtacgcgggagaccgagggtggcagagaccgagacaaagctcccgagaggggagctgaagcgggagagacagagccgaggacgcgcgtttggggaggacgcagaagccgccgaaacaataagggcgaccgacaccttagacagggagagacagagacctcgatcggctgccggccgtcgcgccgagggacgatggagggactgagaaaggcgaggctaagtcgagacgttgttattgaagatgataggattgatgacgtgctgaaaaatatgaccgacaaggcacctcctggtgtctaactcccccaaagacaatgagttaagggagagaataagaacggcggtaacagttattggcaaaaagcatgaaaagagaaagcactttgaaatttattactagcttgctacccacgatgaaatcaacaacctgtatctggtatcaggccgggagacagatgaggcgagaggaggaggaggaggaggagaaggctctgggctcctctgcaaaaataaaaataaaaaaataaataaaattttaaaaataataaaaattcactatatacacatataaagaaataaaaagaagtctcagttgcagctatttgtcaaaattaatatccatttctttttatatacggtgaatattgcgcaattatagatctggattttgaaccacttaatgaagcggcaacaccaggtgttttgaggtgttggcattcttcgctgatttggctgttcccaatgtttacattatttaatctt

SEQ ID NO: 8168 - DNA, 509 bp, Homo sapiens
gaacagagctatgtattggcattgacagaggtatatgcgttatgttagttatttaagaaataatctggagaatttatcatcccctctgagagatttctgcacaatttaattaaggaccctatagtgtgctgtaggataataaagcttttcccccaaaaaacaggtgaatacttaaactaattcaaagagagaagaaagcttcctgaaaggtcatttaattgacttttgctttccaggtgtcaaatcagacactgagcttgttcttcacggttctgcaagatgtcccagtaagagatctgaaaccagccatagtgaaagtctatgattactacgagacggatgagtttgcaattgctgagtacaatgctccttgcagcaaagatcttggaaatgcttgaagaccacaaggctgaaaagtgctttgctggagtcctgttctcagagctccacagaagacacgtgtttttgtatctttaaagacttgatgaataaacactttttctggtcaa

SEQ ID NO: 8169 - DNA, 572 bp, Homo sapiens
aaccaaaactgctctgctcttccgaaaattgcagtcagggaacctgggacccggcaagccagcagaaggagttaaggaaaatgtttgttctgttaagctttacagaaatggaacacagttggagactctggttattttaccaaggctttgactgaaatgccatattttcagatgtgaccagacagctttaagaaactgaggttgatattatgaagcccataggagcttttggaaaaactggtctaatatcctaaatacacggttcacataatgggcttgtgaaactagaaaatgaaaccattccaaaagtggaagtaatttctcactgcccctgtgataaactgtggtcactggctgtggcagcaactattataagatgctctgaaaactcttcagacactgaggggcaccagaggagcagactacaagaatggcacacgctatggaaaactcctggacaatcagtaaagagtaccatattgatgaagaagtgggctttgctctgccaaatccacaggaaaatctacctgatttttataatgactggatgttcattgctaaacatctgcctg

SEQ ID NO: 8170 - DNA, 1554 bp, Homo sapiens
gtggccaactttgatgcaattgtggatattcagaatgagatcatctcccaggtgtgctcaggtgttgatgaacaacttggtgaattggttagtggagaagaagttgttgagcctccttcaaatttgattgccatggaagtctcttcaaaatatgttaagctaaattggaatccatctcctagtccagtgactggctacaaagtcatcctcacaccaatgactgcaggaagccgacagcacgctctgagtgtggggcctcagacaaccacgctcagtgttcgcgacctctcagcagacacagaataccagatcagtgtttccgccatgaagggaatgacatccagtgaacccatttcaataatggagaagactcagccaatgaaagttcaagtggaatgctcacgtggtgtggatataaaagccgatattgtgtttttggttgatggctcctatagcattgggattgcaaactttgttaaagttagagcctttttggaagttcttgtaaaaagttttgaaatttcaccaaatagggtccagattagtcttgtgcaatacagccgggatcctcatactgagttcactttgaaaaaattcaccaaagttgaagatataattgaagcaataaacaccttcccttacagaggaggatctacaaatactggcaaagcaatgacttatgtcagagagaaaatatttgtgcctagcaagggatcaagaagcaatgtgccaaaggtcatgattcttatcacggatgggaaatcatcagatgctttcagagatcctgcgataaaactgaggaattcagatgttgaaatctttgcagttggtgtgaaggatgccgttcgctcagaattggaagctattgcctctcctcctgcagagacccatgtgttcacagtggaagattttgatgcttttcagaggatatcttttgaactcacacagtctatctgccttagaattgagcaagaattggcagctataaagaagaaagcttacgtccctccaaaggatcttagtttttcagaagtgacttcttatggtttcaaaaccaactggtctccagctggagaaaatgttttttcatatcacatcacctacaaggaagcggctggggatgatgaggtcactgtggtggagccagcatcgagcaccagtgttgttctcagcagcctgaagccagagaccttgtatttggtcaatgtgactgcggagtatgaggatggcttcagcattcccttagctggagaggagaccaccgaagaagtaaaaggagcacctcgaaacctaaaggtgacagatgagactacagatagtttcaaaattacttggactcaagctccagggagagttttaagatatcgaattatatatagaccagttgctggtggagagagcagagaagttaccaccccacccaatcagaggaggagaacactggagaacttgattccagacacgaaatatgaagtatctgtaattcctgaatatttctcaggacctggtactccattaactggaaatgcagccactgaagaaggtagaggaaat

SEQ ID NO: 8171 - DNA, 520 bp, Homo sapiens
atcgaccggatgcccaagacatcaaccggaattaggctcttttgagaagaaaacaaagagagtaaccaaatatagaacagctgagtgcattcaccagtctgggagccctgagagtgctttttctaacaaccacagtgttacatatttccttacaccatgggatgataaaacacaggacacatggctccattcaaggctaactgattgcacaacggctctgagcaggagagagcaaaaggtgaaccacagttgtacagcttgctggtggttggggtcacattggactatcaatatccaggagatgttgagaaaaagaggggatcctttccaacaagtcatccagcaactctgggacagaaggaaagctgtgggaagaaaagcagggtgctggtttctaggacactaaacctcatggtatcacatcggtatcctcgaattcaaagtatcaaagtacaatttaccggtaagtattgtcaaaagtttaattgattcatatttttgaaagaatcttctcttcagt

SEQ ID NO: 8172 - DNA, 816 bp, Homo sapiens
cacaggaggagaagcaggagctgtcgggaagatcagaagccagtcatggatgaccagcgcgaccttatctccaacaatgagcaactgcccatgctgggccggcgccctggggccccggagagcaagtgcagccgcggagccctgtacacaggcttttccatcctggtgactctgctcctcgctggccaggccaccaccgcctacttcctgtaccagcagcagggccggctggacaaactgacagtcacctcccagaacctgcagctggagaacctgcgcatgaagcttcccaagcctcccaagcctgtgagcaagatgcgcatggccaccccgctgctgatgcaggcgctgcccatgggagccctgccccaggggcccatgcagaatgccaccaagtatggcaacatgacagaggaccatgtgatgcacctgctccagaatgctgaccccctgaaggtgtacccgccactgaaggggagcttcccggagaacctgagacaccttaagaacaccatggagaccatagactggaaggtctttgagagctggatgcaccattggctcctgtttgaaatgagcaggcactccttggagcaaaagcccactgacgctccaccgaaaggtacagggagtgggagctttagcgtgccagggcttctggaccctcggggctctcctgaagctgctgaggccggggcctccagcactccctggtcccagcaccgcggaatctcccatcctctcagctctcacttctttctcacttctctctctctcctgtctgttccttcttggtttggctgtccccctcccctg

SEQ ID NO: 8173 - DNA, 4695 bp, Homo sapiens
attgggtagatgcaataacagtgcacttcacagtgaactctgccagcaccgcgggcagtcatggggagaccccatcttggggttctgagtcttggctctgggagagcccctctcccccacctccttctttgagcagggagaggttaagcctggccattaacccataggtgacccaaatagaattatctgtcccagggatccgttgattgccagccgctgttgtgacaagaaaagctgtggcaaccgaaatgagactccctcagatccagtgataattgacaggttcttcttgaaatttttcctcaaatgtaaccaaaattgcctaaagaatgcgggaaacccacgtgacatgcggagattccaggtcgtggtgtctacgacagtcaatgtggatggccatgtcctggcagtctctgataacatgtttgtccataataattccaagcatgggcggagggctcggaggcttgacccctcggaaggtacgccctcttatctggaacatgctactccctgtatcaaagccatcagcccgagtgaaggatggacgacgggaggtgcgactgtgatcatcataggggacaatttctttgatgggttacaggtcatattcggtaccatgctggtctggagtgagttgatcactcctcatgccatccgtgtgcagacccctcctcggcacatccctggtgttgtggaagtcacactgtcctacaaatctaagcagttctgcaaaggaacaccaggcagattcatttatacagcgctcaacgaacccaccatcgattatggtttccagaggttacagaaggtcattcctcggcaccctggtgaccctgagcgtttgccaaaggaagtaatactcaaaagggctgcggatctggtagaagcactgtatgggatgccacacaacaaccaggaaatcattctgaagagagcggccgacattgccgaggccctgtacagtgttccccgcaaccacaaccaactcccggcccttgctaacacctcggtccacgcagggatgatgggcgtgaattcgttcagtggacaactggccgtgaatgtctccgaggcatcacaagccaccaatcagggtttcacccgcaactcaagcagcgtatcaccacacgggtacgtgccgagcaccactccccagcagaccaactataactccgtcaccacgagcatgaacggatacggctctgccgcaatgtccaatttgggcggctcccccaccttcctcaacggctcagctgccaactccccctatgccatagtgccatccagccccaccatggcctcctccacaagcctcccctccaactgcagcagctcctcgggcatcttctccttctcaccagccaacatggtctcagccgtgaaacagaagagtgctttcgcaccagtcgtcagaccccagacctccccacctcccacctgcaccagcaccaacgggaacagcctgcaagcgatatctggcatgattgttcctcctatgtgaaagaattgccttgaagaattgtattaatgaagaggttggattctgctacagagagtaatctgatacaagtcccagagtggaacttttaactcaggcctttttaagaggaatcacaataactgcagatttttaaacaaacaaaatcaccgaccttgcaaatactgaaattggaagagggatctgcaagtgcagggtgttggttaaagttgtacctcccaagtatttgggggatatatttattctgtattgacaaaagcaaatccactttttctttttcttttttttttttaagcttaattctgcaatcatttgtcttttataaaccgtaaagctctatacaagggacactataaataagactccatgttttaatttatgatgtttttaaagctgtgtaaaggaagaatgaagtggtgatatttacaaaaaagtaaaaaaaaaaaaaaagaaaaaaaggaaaaaaaaaaaagcttgtatgggacagaataggaatgccagttagattttttagaaaaactaagggtcggcttttgcgccttaaagcatatcaaatggtagttagctcagacagtgcattttcaatatctaacttaacatgccaccccttagcagtgcaagcttatttatctcttttgtattgttgtcttaagcaactgtgtaaataaatgcagcctggaaagttaaaacgcgatgtaagtgatcacatttttccctctactcgaaaatccagtgcctctagacagattgttaaaactgcatatttaaatctgatctcattctctccttttacttaagtcagtttcttctgaagccgatggcctctcgagagcttggtggcacacatactgtgtgagaatctcctttgagacttcatggaacagggtccaggcacagaattccacactctgccctccagttaacaagccaaaacctcacgtacgctcccccatttgcaagtttaaagtttactcgtcctaaatgcagacttcatacctatcttccaaaagttgataaaagcaacgtggcaggtattttcgattttcccattccagatactgcctctatcagtcgacccttaccatttgtaacataatagattgaaacaacaggttaagtgctttggaattaagagttaaagggaaccgggggtggagaaaggaaaagaaggttgagacctccaaaacatagttttctgttctatgggaatttttgctctcattatctgggaagtgttcttaaaaataagaattaatagcaaagatgcagcaaagctctgaggatgcatttgcctgatatttttttctttgctcttgtgtttttgtatgtagttataaatactgtagattttttttttgtgattttttgccaaagttgttgttctatttatacattttaatgtcttaagacattttttcaatatcacaaaaagattttactgcgtattttgcaaagaaaaaaagctcactacctttagcttgcacatacttgcaaagttaattaaaaggctttttgttttaaaggggattttgtaaaatatccatataaataatgtatttatctttcgaatttgtacattgcttttcccttcttcctcttccttccacccccaatttattttattgtgtatgtttgctacgtgaaaagtgcgtatttgtttggtcacctacacttgtattagctgtttcaatgtgatttttaaacatttcatttatagttatttttagtattgttataaaccatgcttcagtttttttaatttccacccaaaagtcattgtctatttttgtattatttgtaagttaagaagttttttccaatatatggcaaaaaaaaaaaaatagtagcatattattcttgtagtatttagttcagtagatttaaaaaaaaatgtatcctttgctttggaagcttacaaaacaaccctaatgctgttttactctattaatatgcatggaatctctccctttggagtgacgcattttgtgcattaaattctagggagaaacttcatagaaatcaatgaacatactttctttcttaagtctgcttgtatatttcctctgtctttcacataaatataaaccagcagattggatgccttaacaatgcaaatcatattcatttcacttgtacattgtaactgtgcaccagaactgtcagtcatcactaacattctaagaaaaaagaaaaagaaaaaaagaaaaaaaaaaaaacaaagaaatcgaaaagcacaaaagaactgttttgttaccttaagacaatgtaactttttctagtagagcaagaaatcatttacaacaatgctgcaactgtgcatgcccccatatggattttgcaatggttttcactaggctgtcaagagtgcgatttttatgggttggggtgggtgggggaggggagttgtgggagggtaggggagggaggaaagctgtttttcatggtgagaaataataatgatgactaataataataaaaaaaactggaaaatgtaagcaaggtggacgcattgcttctcggtactcagaaaggttatctgaatttgcgtggtaagcgctggcctgaagatgtacacaagttaaagccatattttatctggtgagccccttaactgtttctgaaggaatgaacggtcagccgggaaggtgtccggcttagaccttgacaacagacactacccatctgtcagccatgtgcagtggttagaactcttcttgaaagtccaaagagcctttaaaatgtgtataatttgtgttttgttgcttctatttctattgattagatgaaaagacattctggccctctgatcctctttcttctccacaaaagttttacaaataaaagatgttcccctaaatacagaatatggctttaagaagaaaatgaaatgaagaattaaattaagatttcagtgttgggggaaaaaatacagcttctggatgactggattgcataacattgccctggcctcacattgtactaggatgcagcttaaatgaagtcatctctaaatctactaacctttcaccttcttatcaaaactttttgaatagacacacactgtacagttcaattgttagagaacctaactactgtagagattgttaaattttttttttttttttgcaaaaattcaagctgtaaaaacttttcaactttcacaatatttaattaaagttacttcctgtctgtga

SEQ ID NO: 8174 - DNA, 5009 bp, Homo sapiens
tctttttctttttaatttgaagaaaaatcatcagtcttggaatacagaagagaaactagaaatatacgtattttgtttcacatttgaacagtcattcttgaggaatactccatacctgagtagacagccatgtggccatcgcagctactaattttcatgatgctcttagctccaataattcatggtggcaagcacagtgaacgacatcctgcccttgctgctccattgcgacacgctgagcgcagcccaggaggcgctcttccacccagacatctgcttcagcagccagctgcagagcgcaccgctgctcatcgtggacaagggccccgtggagctaccagaggagttcgcggtccaggtgcccaaggagcacagattgcagcgcaagctttcagccgtgccccaattccaatggctgtggtccgcagagagctatcctgtgagagctatcctatagagcttcgctgtccaggaacagacgtcatcatgatagaaagtgccaactatggcaggactgatgacaaaatttgtgactctgaccctgctcagatggagaatatccgatgttatctgccagatgcctataagattatgtctcaaagatgcaataacagaacccagtgtgcagtggtggcaggtcctgatgtttttccagacccgtgtccaggaacctataaataccttgaagtgcagtatgaatgtgtcccttacaaagtggaacaaaaagtttttctttgtcctggactactaaaaggagtataccagagtgaacatttgtttgagtccgaccaccaatctggggcgtggtgcaaagaccctctgcaggcatctgacaagatttattatatgccctggactccctacagaactgataccctgactgagtattcatccaaggatgacttcattgctggaagaccaactacaacctacaagctccctcacagggtggatggcacaggatttgtagtgtatgatggagctttgttcttcaacaaagagcgcaccaggaacatagtaaagtttgatttgcggactaggataaagagtggagaggctatcatagcaaatgccaattaccatgatacctccccttaccgatggggaggcaaatctgacatagacctggcagtagatgagaatgggctatgggtaatctatgcaacagaacaaaacaatggtaaaattgtcattagtcaattgaacccttacaccctacggatcgaaggaacatgggatactgcatatgataaaaggtcagcttccaatgcctttatgatttgtggaattctgtatgtggtcaaatctgtatatgaggatgatgacaatgaggctactggaaataagattgactacatttacaacactgaccaaagcaaggatagtttggtggatgtaccctttcctaattcataccagtacattgcagctgtggattacaaccccagggacaacctactttatgtatggaataactatcacgtcgtgaaatattctttggattttggacctctggatagtagatcagggcaggcacatcatggacaagtttcatacatttctccgccaattcaccttgactctgagctagaaagaccctctgttaaagatatctctaccacaggacctcttggcatgggaagcactaccaccagtaccacccttcggaccacaactttgagcccaggaaggagtaccaccccgtcagtgtcaggaagaagaaaccggagtactagtaccccatctccagctgtcgaggtacttgatgacatgaccacacaccttccatcagcatcgtcccaaatcccagctctcgaagagagctgtgaggctgtggaagcccgagaaatcatgtggtttaagactcgtcaaggacagatagcaaagcagccatgccctgcaggaactataggtgtatcaacttatctatgccttgctcctgatggaatttgggatccccaaggtccagatctcagcaactgttcttctccttgggtcaatcatataacacagaagttgaaatctggtgaaacagctgccaacattgctagagagctggctgaacagacaagaaatcacttgaatgctggggacatcacctactctgtccgggccatggaccagctggtaggcctcctagatgtacagcttcggaacttgaccccaggtggaaaagatagtgctgcccggagtttgaacaagcttcagaaaagagagcgctcttgcagagcctatgtccaggcaatggtcgagacagttaacaacctccttcagccacaagctttgaatgcatggagagacctgactacgagtgatcagctgcgtgcggccaccatgttgcttcatactgtggaggaaagtgcttttgtgctggctgataaccttttgaagactgacattgtcagggagaatacagacaatattaaattggaagttgcaagactgagcacagaaggaaacttagaagacctaaaatttccagaaaacatgggccatggaagcactatccagctgtctgcaaataccttaaagcaaaatggccgaaatggagagatcagagtggcctttgtcctgtataacaacttgggtccttatttatccacggagaatgccagtatgaagttgggaacggaagctttgtccacaaatcattctgttattgtcaattcccctgttattacggcagcaataaacaaagagttcagtaacaaggtttatttggctgatcctgtggtatttactgttaaacatatcaagcagtcagaggaaaatttcaaccctaactgttcattttggagctactccaagcgtacaatgacaggttattggtcaacacaaggctgtcggctcctgacaacaaataagacacatactacatgctcttgtaaccacctaacaaattttgcagtactgatggcacatgtggaagttaagcacagtgatgcggtccatgacctccttctggatgtgatcacgtgggttggaattttgctgtcccttgtttgtctcctgatttgcatcttcacattttgctttttccgggggctccagagtgaccgtaacaccatccacaagaacctctgcatcagtctctttgtagcagagctgctcttcctgattgggatcaaccgaactgaccaaccaattgcctgtgctgttttcgctgccctgttacatttcttcttcttggctgccttcacctggatgttcctggagggggtgcagctttatatcatgctggtggaggtttttgagagtgaacattcacgtaggaaatacttttatctggtcggctatgggatgcctgcactcattgtggctgtgtcagctgcagtagactacaggagttatggaacagataaagtatgttggctccgacttgacacctacttcatttggagttttataggaccagcaactttgataattatgcttaatgtaatcttccttgggattgctttatataaaatgtttcatcatactgctatactgaaacctgaatcaggctgtcttgataacatcaactatgaggataacagacccttcatcaagtcatgggttataggtgcaatagctcttctctgcctattaggattgacctgggcctttggactcatgtatattaatgaaagcacagtcatcatggcctatctcttcaccattttcaattctctacagggaatgtttatatttattttccattgtgtcctacagaagaaggtacgaaaagagtatgggaaatgcctgcgaacacattgctgtagtggcaaaagtacagagagttccattggttcagggaaaacatctggttctcgaactcctggacgctactccacaggctcacagagccgaatccgtagaatgtggaatgacacggttcgaaagcagtcagagtcttcctttattactggagacataaacagttcagcgtcactcaacagaggagccatggctaatcatcttataagcaatgctctgcttcgtccgcatggtactaacaatccctataatacattgcttggggaaccggcggtctgtaacaacccttctgtcagcatgtacaacgcacaagagccctacagagagacaagtatgggagtaaagctaaacattgcatatcaaataggggcttctgaacaatgccagggatacaagtgtcatggatactctaccactgaatggtaaccatggcaatagttacagcattgccagcggcgaatacctgagcaactgtgtgcaaatcatagaccgtggctataaccataacgagaccgccctagagaaaaagattctgaaggaactcacttccaactatatcccttcttacctgaacaaccatgagcgctccagtgaacagaacaggaatctgatgaacaagctggtgaataaccttggcagtggaagggaagatgatgccattgtcctggatgatgccacctcgtttaaccacgaggagagtttgggcctggaactcattcatgaggaatctgatgctcctttgctgcccccaagagtatactccaccgagaaccaccagccacaccattataccagaaggcggatcccccaagaccacagtgagagctttttccctttgctaaccaacgagcacacagaagatctccagtcaccccatagagactctctctataccagcatgccgacactggctggtgtggccgccacagagagtgttaccaccagcacccagaccgaacccccaccggccaaatgtggtgatgccgaagatgtttactacaaaagcatgccaaacctaggctccagaaaccacgtccatcagctgcatacttactaccagctaggtcgcggcagcagtgatggatttatagttcctccaaacaaagatgggacccctcccgagggaagttcaaaaggaccggctcatttggtcactagtctatagaagatgacacagaaattggaaccaacaaaactgctaacaccttgttgactgttctgagttgatataagcagtggtaataatgtgt

SEQ ID NO: 8175 - DNA, 757 bp, Homo sapiens
tcagggaggaagatgagtactcagaactgcgatcagaactcagccagagccaacacgaggtcaacgaggactctcgaagcatggaccaagaccagacctctgtctctatccccgaaaaccagtctaccatggttactgctgacatggacaactgcagtgacctgaactcagaactgcagagggtgctgacagggctggagaatgttgtctgcggcaggaagaagagcagctgcagcctctccgtggccgaggtggacaagcacattgagcagctcaccacagccagcgagcactgtgacctggctattaagacagtcgaggagattgagggggtgcttggccgggacctgtatcccaacctggctgaagagaggtctcggtgggagaaggagctggctgggctgagggaagagaatgagagcctgactgccatgctgtgcagcaaagaggaagaactgaaccggactaaggccaccatgaatgccatccgggaagagcgggaccggctccggaggagggtgagcatgctgcatccataatggtcaggcccttcctgggcatggggctgagagaggctggtgtatagcaccaggggcaccgtgagaattttgtggcatttgtaattttgggaatcactgtctctttcctgttatgaagtccttcttgaaagtagttcgaaattgctaaggtatagaggtaagatttaaaaaaaaaaagcaaacacttttctctggaatcttaaatctgactggttgat

SEQ ID NO: 8176 - DNA, 766 bp, Homo sapiens
atgatgatcctgcaggtttcagggggcccctggacagtggctctgacagcattactgatggtgctgctcatatctgtggtccagagcagggccactccagagaattccgtctaccaggaacggcaggaatgctatgcgttcaatgggactcagcgcgttgtggacgggctcatctacaaccgggaggaatacgtgcattttgacagcgcagtgggggagttcctagcagtgatggagctggggcggcccataggcgagtacttcaatagccagaaggactttatggaacggaagcgagccgaggtggacaaggtgtgcagacacaagtacgagctgatggagccactcatccggcagcgccgagcctagggtgaacatcccccctccaagaaggagccccggcagcaccacgacctgcttgtctaccacgtgacagatttctacccaggcagcattcaagtccgatgcttcctgaatggacaggaggaaacagctggggtcatgtccaccaagctgatccgtaatgaagactggaccttccagatcctggagatgctggaaatgatcccccagcagggaaacatctacacctgccaagtgaagcaccccagcctggacagtcctgtcaccgtggaaggcacagtctgattttgtgcagagcaagatgctgacaggagccaggggcttcatgctggggctcatcatctgtggagtggacatcttcacgcacagaaggagcaagaaagttcaacaaggatctgcataa

SEQ ID NO: 8177 - DNA, 1973 bp, Homo sapiens
gtaatttatccaggaataagtattgtaatttcataccatagcttagttcatgcatatgtaaaatttaaaaatttcaggcaatctttgaattgtaaaccacttaaacattgtttctgagttgaaatagttctgtggtaaagcctggattaccttgataaaacttggagcaaatgaataataccccttgcctctctcattcccctgtgtgtatttcaaccacagagtcacagttcaggccagagggttatgttataccgcgcccggcctataatcttttgttttttttgagatggagtctcgctgtcacccaggctggagtacaatggtgcaatctcggctcactgcaacttccacctcctgggttcacgtgattctcctgcctcagcctccccagctacttgggaggctgaggcaggagaatcgcttgaatctgggaggcagaggttgtagtgagctgagatcacatcattgcactccagcctgggcaataagagtgaaactccatctcaaaaaacaaaaacaaaaactaaaaacaaacaaaaaaaagaaatcccagtttcttcaagaaatagtccctttttagtatgtgtaattctggccagagtgataaaataattattttaaataggtagtagatgatgactccccagagatgtataagacaatctctcaagaatttcttacaccgggaaaactggaaattaattttgaagaattattaaaacaaaaaatggaagaagaaaaacgacgaacagaggaggaacggaagcataagctagaaatggagaaacaagaatttgaacaactgagacaggaaatgggagaggaagaggaagaaaatgaaacctttggattgagcagagaatatgaagaactgatcaaattaaaaaggagtggctctattcaagctaaaaacctaaaaagcaagtttgaaaaaattggacagttgtctgaaaaagaaatacagaaaaaaatagaagaagagcgagcaagaaggagagcaattgaccttgaaattaaagagcgagaagctgaaaattttcatgaggaagatgatgttgatgttaggcctgcaagaaaaagcgaggctccatttactcacaaagtgaatatgaaagctagatttgaacaaatggctaaggcaagagaagaagaagaacaaagaagaattgaagaacaaaagttactacgcatgcagtttgaacaaagggaaattgatgcagcactacaaaagaaaagagaagaggaggaggaggaagaaggtagcatcatgaatggctccactgctgaagatgaagagcaaaccagatcaggagctccatggttcaagaagcctcttaaaaacacatcagttgtagacagtgagccagtcagatttacggttaaagtaacaggagaacccaaaccagaaattacatggtggtttgaaggagaaatactgcaggatggagaagactatcaatatattgaaaggggagaaacttactgcctttacttaccagaaactttcccagaagatggaggagagtatatgtgtaaagcagtcaacaataaaggatctgcagctagtacctgtattcttaccattgaaagtaagaattaatcactctttttatcttttattctattaatttttttttccttaaaatcacttttcttcttctcttttttagctgatgactactagctcccctcccctctccctggaactttctctttcactccaactttcttactacatccatcttttctgtggcggggccaaaaaaggaaaccaggagtgccactatgctgacttcttattccttttcataacagtcttcaaagcacagctcatctaaagaatgcctacttcttttccaaataagcatcagatttatcgcctattatgcagtaacagtcaataaaatgtacttatgggggggaattactcaattattctatcagaacctattataaagactgtatttccc

SEQ ID NO: 8178 - DNA, 564 bp, Homo sapiens
attgttggaccaggcatttctccaaagctcatgagttagggaatgtctcggcagacacctgagggtgagttccttccccttgaccaacttgaactggatgtaggttttagtacaggggcagatcaactttttcttgtgtcccccctcacaatttgccacgtgatcgatgccaaaagccccttttatgacctatcccagcgaagcatgcaaactgaacagttcgagattgtcgtcatcctagaaggcattgtggaaacaactgggatgacttgtcaagctcgaacatcatatactgaagatgaagttctttggggtcatcgtttttttcctgtaatttccttagaagagggattctttaaagttgattactcccagttccatgcaacatttgaagtccccaccccaccttacagtgtgaaagagcaggaggaaatgcttctcatgtcgtcccctttaatagcaccagccataactaacagcaaagaaagacataattctgtggaatgcttagatggactagatgatattactacaaaactaccatctaagctgcagaaaattact

SEQ ID NO: 8179 - DNA, 767 bp, Homo sapiens
ggagaagcaggagctgtcgggaagatcagaagccagtcatggatgaccagcgcgaccttatctccaacaatgagcaactgcccatgctgggccggcgccctggggccccggagagcaagtgcagccgcggagccctgtacacaggcttttccatcctggtgactctgctcctcgctggccaggccaccaccgcctacttcctgtaccagcagcagggccggctggacaaactgacagtcacctcccagaacctgcagctggagaacctgcgcatgaagcttcccaagcctcccaagcctgtgagcaagatgcgcatggccaccccgctgctgatgcaggcgctgcccatgggagccctgccccaggggcccatgcagaatgccaccaagtatggcaacatgacagaggaccatgtgatgcacctgctccagtactgaccaagtgccaggaagaggtcagccacatccctgctgtccacccgggttcattcaggcccaagtgcgacgagaacggcaactatctgccactccagtgctatgggagcatcggctactgctggtgtgtcttccccaacggcacggaggtccccaacaccagaagccgcgggcaccataactgcagtgagtcactggaactggaggacccgtcttctgggctgggtgtgaccaagcaggatctgggcccagtccccatgtgagagcagcagaggcggtcttcaacatcctgccagccccacacagctacagctttcttgctcccttcagccc

SEQ ID NO: 8180 - DNA, 831 bp, Homo sapiens
agcagcctgtacagcgaggagggcctgggtgtcacagcgctcagcaccctctatggaggcatgctcctgtcctccatgttcctcccaccgctcctcatcgagaggctgggctgcaaggggaccatcatcctctccatgtgtggctacgtggccttctccgtgggcaacttcttcgccagctggtacactttgatccccacctccatactgctgggactcggggccgccccgctgtggtctgcacagtgcacatacctcacgatcacgggaaacacacatgcagagaaggcgggaaagcgtggcaaagacatggtgaaccagtattttggcatcttcttcctcatattccagtcatccggtgtgtggggcaacttgatctcatcgctggtatttggccagactcccagccaagagacccttccagaagagcagctcacgtcctgtggggccagtgactgcctgatggccaccacaaccaccaacagcacccagaggccctcccagcagctggtctacaccctcctgggcatctacactggtacgagctccatcggcccagggcagggtccctagcaaagcagagccaagcctccttcctgggctgacaaagactgtctctcccaatgtaaaagtaatctctcttcttctgaaatatccttgcaaaatgtattggtctggattatatgcaggcggtgttcttatgaatcaaatgcagtacacccgtgctgtctaacagaggatcctggggtgatgagattgttatacatctccagagcccaacacagcagccattaagcactgtggttgtttacatcttaactgattaaagtt

SEQ ID NO: 8181 - DNA, 880 bp, Homo sapiens
ggaagggtgttcaatgggtgtcgtgcgtttaaacgtaacctctttgccctctttccttcctcttttgcccattttgtctatccagaattacgttcctacagtgtttgagaattacacggccagttttgaaatcgacacacaaagaatagagttgagcctgtgggacacttcgggttctccttactatgacaatgtccgccccctctcttaccctgattcggatgctgtgctgatttgctttgacatcagtagaccagagaccctggacagtgtcctcaaaaagtggaaaggtgaaatccaggaattttgtccaaataccaaaatgctcttggtcggctgcaagtctgatctgcggacagatgttagtacattagtagagctctccaatcacaggcagacgccagtgtcctatgaccagggggcaaatatggccaaacagattggagcagctacttatatcgaatgctcagctttacagtcggaaaatagcgtcagagacatttttcacgttgccaccttggcatgtgtaaataagacaaataaaaacgttaagcggaacaaatcacagagagccacaaagcggatttcacacatgcctagcagaccagaactctcggcagttgctacggacttacgaaaggacaaagcgaagagctgcactgtgatgtgaatctttcattatctttaatgaagacaaaggaatctagtgtaaaaaacaacagcaaacaaaaaggtgaagtctaaatgaagtgcacagccaaagtcatgtataccagaggcttaggaggcgtttgagaggatactcatctttttggaatcctgaccttaggttcggcatgtagaccaagtgatgagaagtgaatacatggaagagttttta

SEQ ID NO: 8182 - DNA, 663 bp, Homo sapiens
gggcaaccggcgctccccagacccccaacgtcagtggggcctgcttccccgcagtgtccaggagagaaggggcagggggctcccgccgaggctcccatcatcctcagctcgccccgcacctccaagacagactcatatgaactggtgtggcggcctcggcatgagggcagtggccgggcgccaatcctctactatgtggtgaaacaccgcaaggtcacaaattcctctgacgattggaccatctctggcattccagccaaccagcaccgcctgaccctcaccagacttgaccccgggagcttgtatgaagtggagatggcagcttacaactgtgcgggagagggccagacagccatggtcaccttccgaactggacggcggcccaaacccgagatcatggccagcaaagagcagcagatccagagagacgaccctggagccagtccccagagcagcagccagccagaccacggccgcctctcccgtaagccgctagcagcagggacggacgcgcagtcaggactggaactgcctcagaggcctgttcccatggctgaatggggtcttgcttctccccagaagctcccgacaggcccaccatctccacggcctccgagacctcagtgtacgtgacctggattccccgtgggaatggtgggttcc

SEQ ID NO: 8183 - DNA, 1159 bp, Homo sapiens
attttacagaggcagacattgcacataggtatgactgcaaaaatgggtggctaactctgggaagatacttgtgttaaactttatatgacatttaataacccttcatcataaggcaatgttttttacaaaaagattgaaaaaatcatgtaagtcatttactctgcaaaaatggcacattaggtggggttccaaaatccataatgaaacaatgtgttttgcaactaagaaacattcattatgatatatggaaaacactgtctgtctacttgtcctttacgaaaaaatgtaaaactctgaggatcataaaatttaactactaaaaataatcttcgtgtttaagtgatacttatttaagactttacactgttctgtttaaccatggtctcctgtctgattttagccataattgcgaagtatttctaactacaacaatttaattttagacacacccgtgaggaagttgcaagccaacaaaaaagttcaaggatctagaagacgattaagggaaggtcgttctcagtgaaaatccaaaaaccagaaaaaaatgtttatacaaccctaagtcaataacctgaccttagaaaattgtgagagccaagttgacttcaggaactgaaacatcagcacaaagaagcaatcatcaaataattctgaacacaaatttaatatttttttttctgaatgagaaacatgagggaaattgtggagttagcctcctgtggtaaaggaattgaagaaaatataacaccttacaccctttttcatcttgacattaaaagttctggctaactttggaatccattagagaaaaatccttgtcaccagattcattacaattcaaatcgaagagttgtgaactgttatcccattgaaaagaccgagccttgtatgtatgttatggatacataaaatgcacgcaagccattatctctccatgggaagctaagttataaaaataggtgcttggtgtacaaaactttttatatcaaaaggctttgcacatttctatatgagtgggtttactggtaaattatgttattttttacaactaattttgtactctcagaatgtttgtcatatgcttcttgcaatgcatattttttaatctcaaacgtttcaataaaaccatttttcagatataaagagaattacttcaaat

SEQ ID NO: 8184 - DNA, 649 bp, Homo sapiens
ccctgggattctggtgctgatggcggtacttcggttcaggcggaggcatccttaccaaggaatctgcttttcaagtatgccaccaacagtgaagaggttattggagtgatgagtaaagaatacataccaaagggcacacgttttggacccctaataggtgaaatctacaccaatgacacagttcctaagaacgccaacaggaaatatttttggagggtaagtaagggaaatttcttcagacccattaaatgttaggaaaaaatggagctaaaagagctgggtggctcacctttctcatcctgtgctgagaaatgctggggctcacccataagtatccagcatccccatggacacagggaattctgaacaaatgtgatgaaaccgatgaaatgtctggcctgtaggtggttagtgatggagatacgggctatatgtgaatcttgatttttgcaattcattagagctttgtaatgaaaggaaacagtttgttgcttgctttaaggataggttcatttgcatttctccgcaaggaagtagtaatgagttaccaagccttagatttcacccctttttgatttcttgctgacttaactttaattgaatggaagagttatcacaaatgaattatctttttggttttttttttttt

SEQ ID NO: 8185 - DNA, 1870 bp, Homo sapiens; identical to SEQ ID NO: 1752

SEQ ID NO: 8186 - DNA, 683 bp, Homo sapiens
aatgcagagacacaagtaacaggataggttgggtttggtttaaaggagaaggaagaggtaaatatatgtatgttaaaatttggcttttcaccccctaattaaggatgttaatgattgggttgggccaccaaataataatggagtaattaaagaagttactattaatccagacactacttgtggcaatgactgggtctgtgaacatcgatggcgccaaataaggtgagaatatgtatttagacatgtcctctaatagtaaactttccattgcattttatttaaaacagttgaagtttaagaatatcaacgttttatatggtattgtgtttttaggaacatggttaatttccgcaatgtagtggatggccagccttttacaaactggtatgataatgggagcaaccaagtggcttttgggagaggaaacagaggattcattgttttcaacaatgatgactggacattttctttaactttgcaaactggtcttcctgctggcacatactgtgatgtcatttctggagataaaattaatggcaattgcacaggcattaaaatctacgtttctgacgatggcaaagctcatttttctattagtaactctgctgaggatccatttattgcaattcatgctgaatctaaattataaaatttaaaattaaatgcatatcctcaaaacaata

SEQ ID NO: 8187 - DNA, 417 bp, Homo sapiens
ggtccagaattcctggcacccaggctctggggaggagaaagccttccagttctacaactcctgcatggatacacttgccattgaagctgcagggactggtcccctcagacaagttattgaggagcttggaggctggcgcatctctggtaaatggacttccttaaactttaaccgaacgctgagacttctgatgagtcagtatggccatttccctttcttcagagcctacctaggacctcatcctgcctctccacacacaccagtcatccagaccagccagagtttgatgttcccctcaagcaagatcaagaacagaagatctatgcccagatctttcgggaatacctgacttacctgaatcagctgggaaccttgctgggaggagacccaagcaaggtgcaagaacactcttccttg

SEQ ID NO: 8188 - DNA, 1956 bp, Homo sapiens
tttgcttctctgactttgagtcctcttgttagcccctaaatgtttgtactccccaaggttctgctggtgatctcctttcctctccccctccaccctttctattgatctcacctccttctcaggcttcagagagccgtctgtgcaggtgactatgaaatgtgtatttctcatccacctgctttgagcttaagatttacatctggagaggtcaacctaggggagccatggcatctgagactcagcgtgtcttaaaccagattcatctcttactgtcctcaccagcttctccagctctccttttagctgtagtgacagttgcactctctcagccaccagattgtggtgcccttcttcgccacatcttgccttcattctccacattgcattcgttgcagttttcaggcttatccttataaagtatcttttcttccaaaaattgcttgtgtatacatatgcatagagagatatctggaaagaaattcaccagaaagtttaattcaccatccagtctatctctgggtaatgggattctatattgttcaagcttttttttttttttttttaaataacaggccttgattactcatggacttgtgcccagtgtatacccgtctatctcctcagcactcccttgccctgaaccccatcactggggctcagttgctggttcattcattctttgtacctccggtcatcattttccgggtgcctttcaagtaaactttccttagtgaaacccttcttccagctgaatgtttcttcctttcgtgagccctctggtctctatgctatttcctgtattctgccctctgctctccatacatgtgtattttgtgttctgtcctttattagattgtaagctccatgagggcagagtttgggtctgattacccatcctttcccccttttggttacagtctcccagtttttctttgggagacaacaccttttccccctggctacagttttggtgggatgggcagttcaggtgtcctgccaacgagatactcttctcctggaatttgaattttgagtcatgggatacaaggactgacagtgattggcactgattcagcctggccgaggtgctctgaagaagccactcattagttcctgcctcccagatccctggagctgccctggtccctgaactctccgaagcctggttcttcagatattcctcgtatctccagagactgctgctactttgaaacgtacgatagaggccctgatggacagaggagcaatagtgagggacttggaaaacctgggtgaacgagcgcttccttataggatctctgcccacagtcagcagcacaacagaggcgggtatttcttggtggatttttatgcacccaccgcagctgttgaaagcatggtggagcacttgtctcgagatatagatgtgattagagggaatattgtcaaacaccctctgacccaggaactaaaagaatgtgaagggattgtcccagtcccactcgcagaaaaattatattccacaaagaagaggaagaagtgagaagattcgccagattttagccttatatgtaattccttcacatttgggcagcatggacgagaaggaagaatttgcaagtttggcctttatataagcatgtgttgcaggtgctgtttgatttttctaaggtatttttagcccttgatcccctttgcttgcgagaggtggggaactgctcactgacagcttctctgtaacctgcagtaccagtggatcgttcttgattttgttttcattagtgtcatttctttgtcattgaggacttttccccttacaacagtaacaccattttttgaagagcaaaacttataatacctcctgggattgtgagctagtcattcagcctgtgtaaccatgtggaaataaaaattgacgaccaatgtattatatggacaacttttgctttgagtaataaacttgattgtaggaatgtg

SEQ ID NO: 8189 - DNA, 2899 bp, Homo sapiens
catcttccctggtgctagactttcatcctgatcagtctcatatactcttgtggctcccttactacccatatactgttgatttccaaaactgtctttggcctgagttcacttccttcatgccatcaacccgctagacattgctactcatctggtcgcccaagacagaaaccctcattttgtttgtttttcctgtcttttaattatcattctccctcccacccagcaagttggttacctcattttatcagtttcatctctgacatgcctttcaaatgtatttccttatctctattccactgaccaccataacttagtttaggcctcagtttctccagccttgactgttattcataactgagctaatacacccttttatctatgctgtcatctccctcttaaaaaagatctccagaaataaataaaatggaagctttatgaggagaggagttttgtctctctgttccctactgcacttgcacatgcagtaataaacccctgtaataaaaaaacaaaacaaaacaactacaaaaaaaaccccacacaatccaaatcctttaatatggcattcactgtgttttcactatctgtcccaacttacagtctcctctctcctacctcttcctctccttgccactcccccttacctgattatgtacttcagttcctcttgtatttcaatccttgtgttctcagtcccctccatctttgcttttctgtttctttggtccagactgactcagcctcaggtctagcttccccttactcattttcctttcttttggcttgggaaactcctattcatccctgagggcccagttcatcgtctctgtggaactttatctgaccatggcaggcaatcaaaccttaaccttttttctctgtattctatgatttatttctgctaatgtgttacttagcccattactttatagctatgactgtagtatttcccatctttctcactagttttgttttgagctccctatgtttgtatttgtattcctggtacctagtgcaatcccgggcacagggattcatttgtgtgtgtgtgttaaaataaaatgaatataatgtagatgtgtgtagctttttgtaagagccagcgtccaacatccaagagcccaaaagagttagtgcatcaaacagatgataaaccatttagaacaaaaccaaatgcactaaaacaacaaaaatcatgcaaaaccgaacagctaatgatatcttcttttgctttttgtttattaataaaaatgggagccccctgggggtttggggcttttgatttattgtttctttatgaaagtttattttacagatagaaaattttcagctaagtattttatactcaagttgagtctagcacctgaaaattccagacaaactttatttcactacagcaatgtatttagtacaaatttttatcagtttagatgttctggctggtaccttggaattacatcgtgattatataattagattatttaaaattttgcattattagtctcaaagatgtagcatttatatatcatttgaaacatatttctataatatcttgtacagatagtagctattttacagtttttcacttgctatcttactctacatttctcttttattatatagaagtatgttggtgagaaaggaattgatataattattgaaatgttagctaatgtaaatcttagtaaagacttgagtcttctgtcacatggaggacgagtgatagtaagtattccttttcttttttttttttttaccactttaatgttttaccacaatttaacactattttacagtaatctttaactgtagaattgctgtttttcatgttaggttgttggcagcagaggtactattgaaataaacccacgagacaccatggcaaaggagtcgagtataattggagttactctcttttcctcaaccaaggaggaatttcagcaatatgcagcagcccttcaagctggaatggaaattggctggttgaaacctgtgataggttctcaatatccattggagaaggtggccgaggctcatgaaaatatcattcatggtagtggggctactggaaaaatgattcttctcttatgatgattaattctttcatggatttcctatgtaattagaggtactgtctttcccccagttgtacttaccctatcttttctttaattaacattcgattccatgagcttcttatgtgaaaaaataagatttttctttagagagcagaagcagaagagtaaaatttattgtatagctagcaatatttttttatgccatctgtctcaaatcaaagagtcatcatagtaggaaataacatgttagttgtcatttggcatgagtgtgcattccagtaattcttaattgatatttgattaattccatacctttgattaaaacatgctagttcaaaataagactgctcagtttccaagggttttcaagcctacttacctttataaaggttctctagtctctgattagccatgactgtattggactttgaacattttctgaactaaaaacctctattctaaactaatctcatttggatgtgtaagtcttttgtaaaggcaagaataaataatatccaggacaatttattagttttctcagtattttcccaaatattagaatatttacttcattattggttggctgccaatgaccccatatgttctgtgagaatagtagctttatctttgatataatacatagtctccaaataggtaatacttcgcaattgattagattttcagagtagatttagagttatctgtttttctggtgagggtcaaatatttttgttaattaagctcacaaatttgataaattaagaattatctgcatttgtctcgtaacataataatgtgtaataaagtctatagaaaattaa

SEQ ID NO: 8190 - DNA, 559 bp, Homo sapiens
cctttcattctgagccccgtgagatgcgggtgaagagatttccaaggctgtgagagcccctctgcctccccagctcagtccccactccctccgcagacccactccttgccagttgtggtgatctccaacatctgtcagatgccaaatgcctgggcgtccatcctgtggtacaacatgctgaccaacaatcccaagaatgtaaacttttttaccaagcccccaattggaacctgggatcaagtggccgaggtcctgagctggcagttctcctccaccaccaagcgaggactgagcatcgagcagctgactacactggcagagaaactcttgggacctggtgtgaattattcagggtgtcagatcacatgggctaaattttgcaaagaaaacatggctggcaagggcttctccttctgggtctggctggacaatatcattgaccttgtgaaaaagtacatcctggccctttggaacgaagggtacatcatgggctttatcagtaaggagcgggagcgggccatcttgagcactaagcctccaggcaccttcctgctaagat

SEQ ID NO: 8191 - DNA, 2483 bp, Homo sapiens
agattgtagtttttgttttggccggaaaggcttaccatgagttgccagggctgagagagatggagaaggattcgcggcggtgacagattaaattccccagttacattatagacttggaggtgggggatcttctcatcgttagaggccccgatcatgggagataggcggttcggagccagttctgcctaactttgtgttcactgatgttagggctgctagggctgcaaaggtgggcacccctactcgcctaagagctttctcctctcttctctttttcccctttgcctctctccttacatcacctgcccactaagtagacttgtccttgtgtggacgggagccggaaagccttgagaacttattcctcgacccggacatggcacaggagaaaatgaaactaggtttcaagtcgctgccgagttccactaccgcagacggcaacattctgagaagagtcaacagtgcccctttgatcaatggacttggacggagtctcactgtgtcgcccaggctggagtgcagtggcatgatctcggctcactgcaacctctgcctcccgggttcaagcgattctcctgcctcagactcccgagtagctgggacttcaggcacccgccaccacgcccacctaattttttgtatttttagtagagacggggtttcaccgtgttagccaggatggtcttgatctcctgaccttgtgatccgcccaccttggcctcccaaagtgttgggattacaggcgtgagccactgcgcctggcctaaatcttacttcttaaactagacttttaaaatgagatgttggatttcacatttcagtattataaggttttctagataccgtaaaaatgtctgaaaaatgcattcactacatatgttactaactttgctcttcaccttttgttgcatcatactaattgatagttgtaattcacagtaccatagactatcaggaagggattcagagaccagctttaccctccttgtttaacatatgaggaaactgaggcccataaatctccaaaatgacgtttagtggcagagccagtactaggaagctctgtttcctgactcctaaactactgttctggccactactaaccaatacctaagctgattaactctaaatgaatgcagcttttgggtcatttgaggtaggagagaatatattgttcacaaaatgaaaagcaaactaagattgaccaaaaaaaaatacattacctttttaaaataggcaggtagaaaaacatagaagggggactctgcatgttgtgctgagaacaagaacattttattcactcaggattttgctctaattctgttgtgggaaaaaggaattatgggacccactctactagtagaagagagcagtagggagaatgttggatttattgaagacaatataaaaagaagaaataggttgcaaatagacgatggaagatgtgtactggaaggaacctgtggatcctctttaatgtattaaatacaccagagaaggagtggacccttccctaatccttaaagccctggaaacagagagatctcagttatcccttcataccttgctttgttctgcaaaggatttttttgttttgtttgtttgttttttgcttatattagagcatagctacagtgttacattccatagcttaagatcctgatgcatgaagtaaaatttgtacagaaagataagggtcactagcatatttctgtagtaggagtttaaagatacagaaaccacaaagtggacggagtccagggactctagtctgtcagaaagaagtaacataggaatgatgtgtgacatccctgagattaggggacttgcccagatgatctgagggcatattttgtgctgttgtagaaaatgtagggcatagtcagagaagttattctgaagcaagaaaaatttagagtaggattacactgagccttagttgaattcattttcacctcagttctcatttgcatatgtatactgctcacttttctccctttttttttccttccttggccctctaatacttgagtacttcctctttctaaactatacctggccagtaaagcattcttttcagaaaggtgaaagtcactagcatatttctttagtaggaattaaagatatagaaaccacaaagtggacagagttcagagactccagtccctcagaaagaagtaacataggaatgatgtgtgacatgcctgaggtcagggaacttgcccaaatgatctgaggggatgttttgtgctgttgtagaaaatatttagcttgctaaacattgttgcacctctttcaagtaattttcgaactttgcttgatgtttcttctatataaagaccctcttgcaccagcatttgcagaattaaattccttaggtttgtttctttcatatcaactctttaatacagtattactgttttaaagaagtatctgcactgttttatgtatatcttgaactaataaaaattccaacgtcaaaa

SEQ ID NO: 8192 - DNA, 642 bp, Homo sapiens
gtcgaaatgcacctcatgcactctaattagcacgtcaaattagtctctccgtttcagaggtgtagggcctttgtggagccttctcaataaaataatttgccactcttgaaggttagacattctcttctatcaatgtacacataaaggttttgttttgctttgcttgttgtgaattaaaatggggagaaaatgatgtgttagctatcacccagtcatgtgtctttttagtcataggttagcttttcaagacacttcctgcatctctgacctgttgcacctctgttatcttggcacctctgttatcttagcagcaagcacctgcctcagctgacccttgagccataacccataagctcctgaaaagtacatcaagtctaaagtgaaccagctaactcattaagactggaatcatgagcaacaatggagcagacctaacctttggttacatctcctgttttgtagctatccttttgtttggctcaaattttgtgccacttaaaaaatttgatactggtgatggaatgtttctccagtgggttctttgtgctgccatatggttggttgccttggttgtcaatctgatattacattgtccaaagttttggccttttgcaatgcttgggggctgcatttgggcaacag

SEQ ID NO: 8193 - DNA, 1918 bp, Homo sapiens
gcttgagcctgtaccagaatgataagtggaaattagtcctcaaagtaacctcagctgtttcattattgtgtgcctcgagcatctggttattcaagctcctcccacggttcgtattgtgcactcaggcttggcctgtaacattgaagaggagcgctactccgaaagggtctacactatccgggaaggagaaacccttgagttgacttgtctagtcacaggacatccacgtccacaggtggaccaaaacagcaggaagtgcctctgacagattccaagactcaagtgtcttcaatgagactttgaggattacaaatattcagcgacaccaaggaggccggtattactgtaaagcagagaatggcttggggtctccagcgataaagtcaatcagagtggatgtatactatttggatgatccagtagtaactgttcatcaaagtataggtgaagctaaagaacaattttactatgagagaacagtgttcctccggtgtgttgccaattccaatcctcctgttcggtatagctggagacgtggccaggaggtcttgctgcaaggatctgataaaggagttgagatttatgaaccattctttacccagggtgaaacaaagatcttaaaactaaagaatcttcgacctcaggactatgctaattatagctgcattgcttcagtgaggaatgtatgtaatattcctgataagatggtgtcgtttagactgtccaataaaacagcatcaccgtcaattaaactcttggtggatgatcctatagttgtaaatcctggagaggccataacattagtatgtgttacaacaggaggagagcctgcaccttctctcacctgggtcaggtcctttgggactctgcctgaaaagactgttttgaatggaggaactttgaccatacctgccatcacctcagatgatgctggtacttacagctgcattgccaataataatgtgggaaaccctgcaaaaaagtccaccaacatcattgtgagagcattaaaaaaaggacgattttggatcacaccagatccttatcacaaagatgacaacatccagattggccgtgaggtgaaaatatcttgccaagtagaagctgttccttctgaggagctaacatttagttggtttaaaaatggtcgtccattaagaagttctgagcggatggtcattacacagactgatcctgatgtctctccgggaacaacaaacttggacatcattgatttaaaattcacggattttgggacgtacacatgtgtagcatctctgaagggaggaggaatatctgatatcagtatcgatgttaatatatccagcagcacaggtaacactattggagataaaagaaatatattgacttcttccaaaacactacccctggaaagtacccacttaactacagatagatgtggtttctccatagaatggaagctctacaaagtctgagactttgtctgcatcactcattgctataatctcaatagccgaaacaatacatggcacatagaagacaggagcagctcctcaatttgtggtgtccagtgaaaataaaaatgcatgccccttgttcaaaaattaataaactcactatggcaacatcaaagcattaaagcaaatttggggctgttctaagtgtggctacacggatggcaggctcttgaggctagatggcctaggagattttattgtgatagaaggcctacagaagatgatgcctaacctaaagaatgagttactgaagatgattacatattctgtcttcaagccaaaactgacctttgatgttccaatttgcttacaatagagtggaatactagaatgcagtataaagttctataaatctgagattgtatgattcaactgacatcattaaaatgatatttatcccaatactattgaagactaaa

SEQ ID NO: 8194 - DNA, 1885 bp, Homo sapiens
taaattgaccattgcagatgttcgagcagaagaccagggtcagtacacctgcaaatatgaagaccttgaaacttcagcagaactcagaatcgaagctgaaccaattcagtttacaaagcgcatacagaacatcgtggtgagtgagcatcagtctgccacctttgagtgtgaagtgtcctttgatgatgccattgtaacatggtacaaaggaccaacagaactgacagagagccagaaatacaacttcaggaatgatggccgctgccattatatgaccatccacaatgtgaccccagacgatgaaggtgtctactcggtcatcgctcggctggagccaagaggtgaagcaagaagcacggcagagctgtacctaacgacgaaagaaatcaaacttgagctgaagcctcctgatattcctgactccagagttccaatcccaaccatgcctatcagagcagtgccaccagaagaaatccctcctgtggttgctcctcctatcccccttttgctaccaacacccgaagaaaagaaaccaccaccaaaacgtattgaagttaccaaaaaggctgtgaagaaagatgccaaaaaagttgttgcaaagcccaaagagatgacaccacgtgaagagattgtcaagaagcctccacctcctactaccttaattccagcaaaagctcctgaaatcattgatgtatcctctaaagctgaagaagtaaaaataatgactataaccagaaagaaagaggttcagaaagaaaaagaagctgtgtatgagaaaaagcaagcagtccacaaggagaagagagtcttcattgaatctttcgaagaaccttatgacgaactggaggtagaaccatacacagagccatttgaacaaccttattatgaagaaccagatgaagactatgaagagattaaggtagaagctaaaaaagaagttcacgaggaatgggaagaagattttgaagaagggcaagaatactatgaaagggaagaaggctatgacgaaggggaggaagagtgggaagaggcttaccaagaaagggaagtaattcaagttcaaaaggaggtctatgaagaatcacatgagagaaaagttccagccaaagtacctgaaaagaaagcaccaccacctcctaaagttataaagaagccagtaattgaaaaaattgaaaagacttctcgaagaatggaggaagaaaaagttcaagtcaccaaagtacctgaagtttcaaagaagattgttccacaaaaaccttcccggactccagtacaggaagaagttattgaagtgaaagtaccagctgtgcatacaaagaagatggttatttcagaagaaaagatgttctttgcttctcacacagaggaggaggtgtcagtcacagtccccgaggtacaaaaggaaattgttactgaagagaaaattcacgttgccatttccaaaagggttgaaccaccacctaaagtccctgagctacctgagaaaccagctccagaagaagtggcccctgttcctatccctaaaaaagtggagcccccagcaccaaaagttcctgaggttcccaagaaacccgtgccagaggagaaaaagccagttcctgtgcctaagaaggaacctgctgctcccccaaaagtcccagaggtgccaaagaaacctgtccctgaagaaaagattcccgttcctgttgcaaagaaaaaggaagctcccccagctaaagtgccagaaataccaaagaagaaagttcctgaagaaaggaaacctgttcctcggaaggaggaagaagttccaccaccaccaaaagtgccagctctgcctaagaaacccgtcccagaggagaaagttgcagtgccagttcctgtcgctaagaaagctcctcctccccga

SEQ ID NO: 8195 - DNA, 1095 bp, Homo sapiens
agtgcttgttcctgtcttgtgactgctggtctccttaaggccaggctgggctaatgcagtagagctagactaaagcacagctgaaccctcaagcaggaactgagagcaaattgtattgaaactgcttcagctgtcggagatcgtttatatgtcttccttttttctgcattggttgggaataaaattgaatctattccagtaaaaggaccagccctatcaagaaagaggaagaaggaagtggatgctacttcacctgcaccctccacaagcagcactgtcaaaactgaaggagcagaggcaactcctggagctcagaaaagaaaaaaatcaaccaaagaaaaggctggacccaaagggagtaaggtgtccgaggaacagactcagcctccctctcctgcaggagccggcatgtccacagccatgggccgttccccatctcccaagacctcattgtcagctccacccaacagttcttcaactgagaacccgaaaacagtggccaaatgtcaggtaactcccagaagaaatgttctccaaaaacgcccagtgatagtgaaggtactgagtacaacaaagccatttgaatatgagaccccagaaatggagaaaaaaataatgtttcatgctacagtggctacacagacacagttcttccatgtgaaggttttaaacaccagcttgaaggagaaattcaatggaaagaaaatcatcatcatatcagattatttggaatatgatagtctcctagaggtcaatgaagaatctactgtatctgaagctggtcctaaccaaacgtttgaggttccaaataaaatcatcaacagagcaaaggaaactctgaagattgatattcttcacaaacaagcttcaggaaatattgtatatggggtatttatgctacataagaaaacagtaaatcagaagaccacaatctacgaaattcaggatgatagaggaaaaatggatgtagtggggacaggacaatgtcacaatatcccctgtgaagaaggagataagctccaacttttctgctttcgacttagaaaaaagaaccagatgtcaaaactgatttcagaaatgcatagttttatccag

SEQ ID NO: 8196 - DNA, 810 bp, Homo sapiens
agataccgagacatgtgactatggctggcacaaattccaagggcagtgctacaaatactttgcccatcgacgcacatgggatgcagctgaacgggaatgccgtctgcagggtgcccatctcacaagcatcctgtctcacgaagaacaaatgtttgttaatcgtgtgggccatgattatcagtggataggcctcaatgacaagatgtttgagcatgacttccgttggactgatggcagcacactgcaatacgagaattggagacccaaccagccagacagcttcttttctgctggagaagactgtgttgtaatcatttggcatgagaatggccagtggaatgatgttccctgcaattaccatctcacctatacgtgcaagaaaggaacagtcgcttgcggccagccccctgttgtagaaaatgccaagacctttggaaagatgaaacctcgttatgaaatcaactccctgattagataccactgcaaagatggtttcattcaacgtcaccttccaactatccggtgcttaggaaatggaagatgggctatacctaaaattacctgcatgaaccgtaagtggtcctttagaaagaatggactaccgtgctataacaactactagacaccttcattttacggctgtggtatcggcagtttagggtatggagcaagtaatattgtgtgttttctttttttctttctttccttccatgtagcatctgcataccaaaggacttattctatgaaatactttaaaaattcctcatcagcaaaggacaattcaataaatacatccaaacatgatcatcg

SEQ ID NO: 8197 - DNA, 730 bp, Homo sapiens
tgattcagaagtcgataagaccaggagaagtgaagatgtaacatgttatctgtcgctcctcttagctggcggagagaatttacatttaaagattagcagagtgagaaagagaaatctgccttttgttgtgtggggtgaggaggaggcatctacccctggccttgacgctatctcccatcacctctgctatccagacaggactcaccgaggcgcacgcgcccagcaccctgcctccggcgatgccgccccagcccctctgatggccctcctctctgctgccactcattccagaacaggaggcatgagcccggaacgcgcttgcttttaggagacagccactttctgtgtggtacgctggattcaaggatgcctgataaaccccacttgaaaaactgaggtgcttaaggagtaaaataatatgttcctggtggcatcctccagatcgtactgagaagcactccacaatgccagactcacctgtggatgtgaagacgcaatctaggctgactcctccaacaatgccacctcccccaactactcaaggagctccaagaaccagttcatttacaccgacaacgttaactaatggcacgagccattctcctacagccttgaatggcgccccctcaccacccaatggcttcagcaatgggccttcctcttcttcctcctcctctctggctaatcaacagctgcccccagcctgtggtgccaggcaactcagcaagct

SEQ ID NO: 8198 - DNA, 485 bp, Homo sapiens
caggcaaggtgaggagacagagccatctctttcacctggtgactctggaccttccttctttctgatgatgaagtccaagcatctgaatggggatgagagaagtggcagtaattacaggcggatcccatggggccggaggcctgcaccaccgcgagatgtggccattttacaagaaagggctaataagttggtgaaatacctgttggttaaggaccagacaaagatccccatcaaacgctcagacatgctgagggatgtcatccaagaatatgatgaatatttcccagaaatcattgaacgagcaagctacactctggagaagatgtttcgagtcaatctgaaagaaattgataagcaaagtagcttgtatattctcatcagcactcaggaatcctctgcaggcatactgggaacgaccaaggacacacccaagctgggtctcctcatggtgattctgagtgtcatttttatgaatggcaacaagg

SEQ ID NO: 8199 - DNA, 550 bp, Homo sapiens
gatatacgagcaaccccaagcactccctcctcctccccacagccacagtggactggaagtaccttttcccagtgcacacgctgaggacccagcgcctaccggccgagcaccccctagggcagaggggcgagggagacccgcgggaaggggcagcaagccgcctgattgacagcccgaaatctgatcttgtgaaagagacgcggagccaatgggaggcagcgatccatcagtttggattggaggcccctggaggagaagtagaggaaaaaccaccgaattgagctctgtcagaggcgctttcggcttccaagggggaagtgctgggctataattaatgtttttattaaatttggagggaagtttttgcagcctttcgcctagcgtggccttcagtcccgttaggtgcaaagcaagtctcgttgatcgccattgctagttttgcacacgtttgcgaatcagagctgcccggggtacaccgaccgcgcagggaaacatcgagagtgtaaataaatacatcgcctcttgttcggatttttgctactaccgaaaa

SEQ ID NO: 8200 - DNA, 704 bp, Homo sapiens
acagtgatgggagtgtgaccgtcactatagtttgggatctccccgaggagccggacatccctgtgcatcattacaaggtcttttggagctggatggtcagcagtaagtctcttgtcccaacaaagaagaagcggagaaagactacggatgggtttcaaaattctgtgatcctggagaaactccagccagactgtgactatgttgtggaattgcaagccataacgtactggggacagacacggctgaagagtgcaaaggtgtcccttcacttcacatcgacacatgcaaccaacaacaacagaactacaggaaacagtggaagcagaaatgaccaacatggagttggggaatgagagtcacatcatccctcatgaagtcctgaagagtgagcgatctgcaggcccacaaggaatggacatcattccacacaaacgcagcagcgtggatgagtgtagagagttagagaagcgcattgcatgggcagagaactcagcgtgaggaaagaatgaaggtggatgggccactggtctctcccctggaggtctcattgagttgcaaggatttaaccaccatctgtgtgctaatgactccctgccctcccaccctgaccactctttgaactccagagtcctgcattcagccacccacttagcacctccccttggatggcttgcagatatttcaaataaaacgttcaaacacaa

SEQ ID NO: 8201 - DNA, 1353 bp, Homo sapiens
gacctctgtattcaacattcctatcacttttgtaggtaactgtgctattgcataatatggccatacttaagtcattttccttgagaatagagaagtaaaggagaaaccaatgatttttcccccacttcagatctcacctgccagcactgatgtaagacttcacctccctatttcaaggcacattattatcatcagtctggataaatttgcaaaggaaaatgagagttactggtgtgattacccaaggagccaagaggattggaagcccagagtatataaaatcctacaaaattgcctacagtaatgatggaaagacttgggcaatgtacaaagtgaaaggcaccaatgaagacatggtgtttcgtggaaacattgataacaacactccatatgctaactctttcacaccccccataaaagctcagtatgtaagactctatccccaagtttgtcgaagacattgcactttgcgaatggaacttcttggctgtgaactgtcgggttgttctgagcctctgggtatgaaatcaggacatatacaagactatcagatcactgcctccagcatcttcagaacgctcaacatggacatgttcacttgggaaccaaggaaagctcggctggacaagcaaggcaaagtgaatgcctggacctctggccacaatgaccagtcacaatggttacaggagaactaaaggaaaggttttcaaaattaagtgaccaccaggccactggaaacatttgtcaatatgaaggattattctgatttccaaatcacagttccaatatttctcatttatgaaggttcacctataaagaagatctaaaagaggtcaagtaatgaaacttgtatatgattgtgagacagcttccgttcttctatagtattgacatatgttggagtgtgctaagtgaatcgaaggatgctcacactttcctaggactataagtcatctttatgtattttttcatttttttaaaccacataccatgaataagaaatctttttgatttttataattttatgatgtcaaagggaatccccactatccaattagaaaaaagaactttttataaacaaaacaaaattgaaaggacatttgtacagaaaatacttaagtgcaaacaaaagtgcagccaatatcaatgtagtataaggagtgcataatttgaggtacaaaatatagatgtgagggctgacaaattatatcaatactctgagacttcaatattctttctttttttatgtaaaatggagatactacaaaaaaagatcagccccagcctatcttctccttttaaaattcctcacacaagtaaaattctggtgtctaaatcatgactggacgaatc

SEQ ID NO: 8202 - DNA, 567 bp, Homo sapiens
cctcctcaaagagcagatgtgtctttataacagactgtaggcttggagccttgtaaaatgtacatggagtttcacaatcaagcacaaggaatccaactgaaggcagctaaactttgtgttgatttgattagtgtgatctcagctcaaggcaaaggtgggatatcatggcatctatctgggttggacaccgaggaacagtaagagattatccagactttagcccatcagtggatgctgaagctattcagaaagcaatcagaggaattggaactgatgagaaaatgctcatcagcattctgactgagaggtcaaatgcacagcggcagctgattgttaaggaatatcaagcagcatatggaaaggagctgaaagatgacttgaagggtgatctctctggccactttgagcatctcatggtggccctagtgactccaccagcagtctttgatgcaaagcagctaaagaaatccatgaagggcgcgggaacaaacgaagatgccttgattgaaatcttaactaccaggacaagcaggcaaatgaaggatatctctcaagcctattatacag

SEQ ID NO: 8203 - DNA, 595 bp, Homo sapiens
tgaaggacctggtggtgagtggtgactgcggcccgggctgtgggcaggccaggcctgggatgacagcagatggacagacatggggatgagtccaggccagatgttcaaaggagaccctctcagccagccctccttccagaaagcagataaatctcaggaagaaattgcagcatgggaagatggacagcaaagcaccgatgtcctgctagaacgtcctggcaggttgcttatggaaccacagagaacagtcccgtgacattcgcgcacttccctgaggacactgtggagcagaaggcagaaagcgtgggcagaattatgcctcacacggaggtgagcccctgaccaagactccaaagtcccacctcccgtcacccagctggggtgcacccagctgggacatcggttgctttcagtgagagagtcaaatggctcactcaggatgcctagagccccccagcagcaggggtgtgctaggcctggcccggagtgttctctgtgggctaagcatgaaaggggaagagctggaacagtggctgtgagcggctgccagctgaacttctccgcggcctcccttcctgtctgaggtgtgtttttg

SEQ ID NO: 8204 - DNA, 696 bp, Homo sapiens; identical to SEQ ID NO: 7834

SEQ ID NO: 8205 - DNA, 670 bp, Homo sapiens
gaatgagggccctaggttggatcttagttgtaaagctcccccaggtgatccaagcgagcttgggacgagcaacctaaagaaagtcatgctctacgcccatcgccccgccccagggagcggggtcggcctctgcgccggcgcccctggcccttctgttactcatctacagctccgtgatttcaaggcatccttcccacccgttcgtttttagctcggctgccgaacttcattgcacagttgagaaaatgtgatgttctgaatcgtggattttcaggttacaataccaggtgggccaaaattatccttccaagattaatcaggaaaggaaacagtttggacatcccagtagcagttacaattttctttggggccaatgacagtgcactaaaagatgagaatcccaagcagcacattcccctggaggagtacgctgcgaacctaaagagcatggtgcagtacctgaagtccgtggacatccctgagaatcgagtcattctcatcacgccgaccccactttgtgaaacagcctgggaagaacagtgcatcatacaaggttgcaaactaaatcgcctgaactctgttgttggtgaatatgccaatgcgtgtttacaagtggcccaagactgtgggactgacgtacttgacctgtggaccctgatgcaggacagcc

SEQ ID NO: 8206 - DNA, 2942 bp, Homo sapiens
ggcaccaagacacaaccaggaactgccccaggagtgacttcacgagcagtttattcattgcaattgttctcatggtgataaagaaaaagtaccaggagatggatcctggactggaaggtcagagaagcctccctgaaaaggtggcatctaagctgaggctgtgaatgctgagcagaagttagcccgtggccaggggaggtcagaggctggagtaagaggtgggcgctgcaggaaccgagtaaggaaggactcgtgcattacaggaagggggagaaatgctctgcccatgggatgtggtgaagggtgagcggagatggagtaaagaactgcatctggccgggtgcagcggctcaggcctataatcccagcactttgggaggctgaggcgggcggatcatgaggtcaggagttcaagaccagcctggcctacacggtgaaaccccgactctactaaaaatacaaaacttagctggacgtggtggcgcatgcctgtaatcccagctactcgggaggctgaggcaggagaattgcttgaactgaggaggtggagtttgcagtgagctgagattgcactgctgtactccagcctgggcgacagagcgagactccgtctcaaaaaaaaaaaaaaaaaaaaaaaaaaaggctttcaacagcattacagagtctgtgttcttttgattgttaacctctttttttttcctacctttagttttctccagggtgttttcacgcaattggaagattatttggcctctttctgaacaatgtccagctgggtcccagccttacagagaagctatgtttggaattagcaaacacaagcattcggaatctgtctctgagtaacagccagctgtccaccaccagcaatacaactttcttgggactaaagtggacaaatctcactatgctcgatctttcctacaacaacttaaatgtggttggtaacgattcctttgcttggcttccacaactagaatatttcttcctagagtataataatatacagcatttgttttctcactctttgcacgggcttttcaatgtgaggtacctgaatttgaaacggtcttttactaaacaaagtatttcccttgcctcactccccaagattgatgatttttcttttcagtggctaaaatgtttggagcaccttaacatggaagataatgatattccaggcataaaaagcaatatgttcacaggattgataaacctgaaatacttaagtctatccaactcctttacaagtttgcgaactttgacaaatgaaacatttgtatcacttgctcattctcccttacacatactcaacctaaccaagaataaaatctcaaaaatagagagtgatgctttctcttggttgggccacctagaagtacttgacctgggccttaatgaaattgggcaagaactcacaggccaggaatggagaggtctagaaaatattttcgaaatctatctttcctacaacaagtacctgcagctgactaggaactcctttgccttggtcccaagccttcaacgactgatgctccgaagggtggcccttaaaaatgtggatagctctccttcaccattccagcctcttcgtaacttgaccattctggatctaagcaacaacaacatagccaacataaatgatgacatgttggagggtcttgagaaactagaaattctcgatttgcagcataacaacttagcacggctctggaaacacgcaaaccctggtggtcccatttatttcctaaagggtctgtctcacctccacatccttaacttggagtccaacggctttgacgagatcccagttgaggtcttcaaggatttatttgaactaaagatcatcgatttaggattgaataatttaaacacacttccagcatctgtctttaataatcaggtgtctctaaagtcattgaaccttcagaagaatctcataacatccgttgagaagaaggttttcgggccagctttcaggaacctgactgagttagatatgcgctttaatccctttgattgcacgtgtgaaagtattgcctggtttgttaattggattaacgagacccataccaacatccctgagctgtcaagccactacctttgcaacactccacctcactatcatgggttcccagtgagactttttgatacatcatcttgcaaagacagtgccccctttgaactctttttcatgatcaataccagtatcctgttgatttttatctttattgtacttctcatccactttgagggctggaggatatctttttattggaatgtttcagtacatcgagttcttggtttcaaagaaatagacagacagacagaacagtttgaatatgcagcatatataattcatgcctataaagataaggattgggtctgggaacatttctcttcaatggaaaaggaagaccaatctctcaaattttgtctggaagaaagggactttgaggcgggtgtttttgaactagaagcaattgttaacagcatcaaaagaagcagaaaaattatttttgttataacacaccatctattaaaagacccattatgcaaaagattcaaggtacatcatgcagttcaacaagctattgaacaaaatctggattccattatattggttttccttgaggagattccagattataaactgaaccatgcactctgtttgcgaagaggaatgtttaaatctcactgcatcttgaactggccagttcagaaagaacggataggtgcctttcgtcataaattgcaagtagcacttggatccaaaaactctgtacattaaatttatttaaatattcaattagcaaaggagaaactttctcaatttaaaaagttctatggcaaatttaagttttccataaaggtgttataatttgtttattcatatttgtaaatgattatattctatcacaattacatctcttctaggaaaa

SEQ ID NO: 8207 - DNA, 2843 bp, Homo sapiens
aagagtgttagggagcctccaaacggagcacgctcacggagaatctcccgttcagaaacatcgcttagtcctcatttactcactgggaacctcggaggatttcagctgatgtttttctctccttagacagtgaggagctcaacataacagggaaaaggagcacaggatgcagctacttggagggtgttgattgaaaacttcgatctccccaccccattcacggttgatttgacggatttctcacctcgttcacagagaaaatttcaattaaggcccctttagatggaatataatacagcagaagccttttcatcaaaaggattaatgcctgcatcatcatttctgcaataaaacaagaagctaagtggtggaggccacagacacctcaaacctggattccacaattctacgttaagtgttggagtttttattactctgctgtaggaaagcctttgccaatgcttacaaggaactgtttatccctgcttctctgggttctgtttgatggaggtctcctaacaccactacaaccacagccacagcagactttagccacagagccaagagaaaatgttatccatctgccaggacaacggtcacatttccaacgtgttaaacgtggctgggtatggaatcaattttttgtgctggaagaatacgtgggctccgagcctcagtatgtgggaaagctccattccgacttagacaagggagagggcactgtgaaatacaccctctcaggagatggcgctggcaccgtttttaccattgatgaaaccacaggggacattcatgcaataaggagcctagatagagaagagaaacctttctacactcttcgtgctcaggctgtggacatagaaaccagaaagcccctggagcctgaatcagaattcatcatcaaagtgcaggatattaatgataatgagccaaagtttttggatggaccttatgttgctactgttccagaaatgtctcctgtgggtgcatatgtactccaggtcaaggccacagatgcagatgacccgacctatggaaacagtgccagagtcgtttacagcattcttcagggacaaccttatttctctattgatcccaagacaggtgttattagaacagctttgccaaacatggacagagaagtcaaagaacaatatcaagtactcatccaagccaaggatatgggaggacagcttggaggattagccggaacaacaatagtcaacatcactctcaccgatgtcaatgacaatccacctcgattccccaaaagcatcttccacttgaaagttcctgagtcttcccctattggttcagctattggaagaataagagctgtggatcctgattttggacaaaatgcagaaattgaatacaatattgttccaggagatgggggaaatttgtttgacatcgtcacagatgaggatacacaagagggagtcatcaaattgaaaaagcctttagattttgaaacaaagaaggcatacactttcaaagttgaggcttccaaccttcaccttgaccaccggtttcactcggcgggccctttcaaagacacagctacggtgaagatcagcgtgctggacgtagatgagccaccggttttcagcaagccgctctacaccatggaggtttatgaagacactccggtagggaccatcattggcgctgtcactgctcaagacctggatgtaggcagcagtgctgttaggtacttcatagattggaagagtgatggggacagctactttacaatagatggaaatgaaggaaccatcgccactaatgaattactagacagagaaagcactgcgcagtataatttctccataattgcgagtaaagttagtaaccctttattgaccagcaaagtcaatatactgattaatgtcttagatgtaaatgaatttcctccagaaatatctgtgccatatgagacagccgtgtgtgaaaatgccaagccaggacagataattcagatagtcagtgctgcagaccgagatctttcacctgctgggcaacaattctcctttagattatcacctgaggctgctatcaaaccaaattttacagttcgtgacttcagaaacaacacagcggggattgaaacccgaagaaatggatacagccgcaggcagcaagagttgtatttcctccctgttgtaatagaagacagcagctaccctgtccagagcagcacaaacacaatgactattcgagtctgtagatgtgactctgatggcaccatcctgtcttgtaatgtggaagcaatttttctacctgtaggacttagcactggggcgttgattgcaattctactatgcattgttatactcttagccatagttgtactgtatgtagcactgcgaaggcagaagaaaaaagacaccctgatgacctctaaagaagacatcagagacaacgtcatccattacgatgatgaaggaggtggggaggaagatacccaggctttcgacatcggggctctgagaaacccaaaagtgattgaggagaacaaaattcgcagggatataaaaccagactctctctgtttacctcgtcagagaccacccatggaagataacacagacataagggatttcattcatcaaaggctacaggaaaatgatgtggatccaactgccccaccatacgattcactggccacatatgcctacgaagggagtgggtccgtggcagagtccctcagctctatagactctctcaccacagaagccgaccaggactatgactatctgacagactggggaccccgctttaaagtcttggcagacatgtttggcgaagaagagagttataaccctgataaagtcacttaa

SEQ ID NO: 8208 - DNA, 2135 bp, Homo sapiens
acaccaactgctgaggctgccttgggaagaggatgatcctaaacaaagctctgctgctgggggccctcgctctgaccaccgtgatgagcccctgtggaggtgaagacattgtgggatccatctctgactccctgctcctttatagagatggacagtgggtttgtaaaacaaaagttgaaaagtcagatagttaaaaggggaagtgaactggaaggtactttaaactttcacaactttattaaccgtggctgctcccattatgattttgttcggcagtggaagtttcacctgcttctccagagcgcttggcgtctttgttccaaatttcctttcttcaacctcacaccagagtgccctggtcaggcttggctcattcattaggcacaatgtgggcagtgcaggggaccctccatactgtaaagccacatgagaaggttttaactccttttaaaattagaaaaataatggaatattagagcctaagaaaatgttttaacttttaattcagcctagattatattgtctttataccaattcagtcataaaatataattttccatatttttgtggaggaagaggcccatacaagcaagaatgctcggggctcacatgtcagaatgcagccttggtcatgactgatcctggccttcgtatggttctgctacctgtgtgcctgcccgtcttccccaaaatctatgtggtcctcgaatatagcaactgtcattcaatacacatgtttgagcacacagtgagctaagttttaaggattcaaagatgaaaagtcatgctgtcttccctgcagagggtgctcagattagtgatggaaacagtatggggtgcaggaaagcagaaggccattgctgagcagggcagtggacccagcagaggctgaaacaatacaagtgacttggttccaggtgggccagcagggtgacgtcctctagcaaaatttggcacccaagacaagtaccagaagaaaagaaagactgcatgtattccacatatattcatgtttgaacaaggagtcaagatttatggcaaggataaggaggctttgttggtgacctgttaagaccaaccagggcagtcatgctggatagggaagaagctgaccacgttgcctcttgtggtgtaaacttgtaccagttttacggtccctctggccagtacacccatgaatttgatggagatgagcagttctacgtggacctggagaggaaggagactgcctggcggtggcctgagttcagcaaatttggaggttttgacccgcagggtgcactgagaaacatggctgtggcaaaacacaacttgaacatcatgattaaacgctacaactctaccgctgctaccaatgaggttcctgaggtcacagtgttttccaagtctcccgtgacactgggtcagcccaacaccctcatttgtcttgtggacaacatctttcctcctgtggtcaacatcacatggctgagcaatgggcagtcagtcacagaaggtgtttctgagaccagcttcctctccaagagtgatcattccttcttcaagatcagttacctcaccttcctcccttctgctgatgagatttatgactgcaaggtggagcactggggcctggaccagcctcttctgaaacactgggagcctgagattccagcccctatgtcagagctcacagagactgtggtctgtgccctggggttgtctgtgggcctcatgggcattgtggtgggcactgtcttcatcatccaaggcctgcgttcagttggtgcttccagacaccaagggccattgtgaatcccatcctggaagggaaggtgcatcgccatctacaggagcagaagaatggacttgctaaatgacctagcactattctctggcccgatttatcatatcccttttctcctccaaatatttctcctctcaccttttctctgggacttaagctgctatatcccctcagagctcacaaatgcctttacattctttccctgacctcctgattttttttttcttttctcaaatgttacctacaaagacatgcctggggtaagccacccggctacctaattcctcagtaacctccatctaaaatctccaaggaagcaataaattccttttatgagatctatgtcaaa

SEQ ID NO: 8209 - DNA, 324 bp, Homo sapiens
cctctgatgggaagttggctgccatacctttacagaagaagagtgacatcacctacttcaaaaccatgcctgatctccactcacagccagttctcttcatacctgatgttcactttgcaaacctgcagaggaccggacaggtgtattacaacacggatgatgaacgagaaggtggcagtgtccttgttaaacggatgttccggcccatggaagaggagtttggtccagtgccttcaaagcagatgaaagaagaagggacaaagcgagatatctgagaaatatgggctgcccgtggagaagatagcaaagctttacaagaaaagc

SEQ ID NO: 8210 - DNA, 431 bp, Homo sapiens
gcttctcgatgtgaacgaaaacgggaagaggcgaactccagacagctattttcccaccagctctttcccagtatttcatatttgaatgtattgtgacttttgactatccttgcacagtcttaagaaccaaagaaaatggctttgacagagagcctttgcactcagaacatccaagcaagcgaccatgcactattagcccaggccagcggtacagtccaaataacggcttatcctaccagcccaatggcctgcctcaccctaccccacctccacctcagcattaccgtttggatgatatggccattgcccaccactacagggactcctatcgacaccccagccacagggacctcagggacagaaacagacctatggggttgcatggcacacgtcaagaagaaatgattgatcacagactaacagacagagaa

SEQ ID NO: 8211 - DNA, 828 bp, Homo sapiens
ataggttggcactcatcatgagcccctgttctcattctgcaaatggtgaagctctctattgtcctgaccccacagttcctgtcccatgaccagggccagctcaccaaggagctgcagcagcatgtaaagtcagtgacatgcccatgcgagtacctgaggaaggttgatggacggatggctacatggatgtgatggagatggtttactatcgggaccttccgcaccctgctgatgttttgttgcttaggatatgaatggctgagcggaggctgtaaaacctggcactctgcttgggtatgaggttcttcctgccatcctgccatcatttgttttttatgttttgtcgccataagtgaccttgaggaaccctgggagctcaggaaggaaggagcgcccagaagcagggacagggagctggttggggaggaccagaaatcaggttatcaatactctggctgaccatcatcatcgtgggactgactttggtggaagtccttggttacatgtcattattgcgtttccgacaagttataaagttgtcattaccctctggatagtttacctttgggtgtctctcctgaagactatcttctggtctcgaaatggacatgatggatccacggatgtacagcagagagcctggaggtccaaccgccgtagacaggaagggctgaggtccatttgtatgcacacaaagaaaagagtttcttcctttcgaggaaataaaattggcctgaaagacgtcattactctacggagacatgtggaaacaaaagttagagctaaaatccgtaagaggaaggtgacaacgaaaatcaaccatcatga

SEQ ID NO: 8212 - DNA, 2007 bp, Homo sapiens
acacatattctccacgccatggaggccactgcttgaggatgggggaggagtagtataagcagttcaatactgtcttttttaccatcttcagtgcttcttggtgatatgaagtaaaaccaggatgattatttccgcacttggagtccaggaaaacccttcgatcaggctttagatccagctaaggatccatgcttaaagatgaaatgtagtcgccataaagtatgcattgctcaagattctcagactgcagtctgcattagtcaccggaggcttacacacaggatgaaagaagcaggagtagaccataggcagtggaggggtcccatattatccacctgcaagcagtgcccagtggtctatcccagccctgtttgtggttcagatggtcatacctactcttttcagtgcaaactagaatatcaggcatgtgtcttaggaaaacagatctcagtcaaatgtgaaggacattgcccatgtccttcagataagcccaccagtacaagcagaaatgttaagagagcatgcagtgacctggagttcagggaagtggcaaacagattgcgggactggttcaaggcccttcatgaaagtggaagtcaaaacaagaagacaaaaacattgctgaggcctgagagaagcagattcgataccagcatcttgccaatttgcaaggactcacttggctggatgtttaacagacttgatacaaactatgacctgctattggaccagtcagagctcagaagcatttaccttgataagaatgaacagtgtaccaaggcattcttcaattcttgtgacacatacaaggacagtttaatatctaataatgagtggtgctactgcttccagagacagcaagacccaccttgccagactgagctcagcaatattcagaagcggcaaggggtaaagaagctcctaggacagtatatccccctgtgtgatgaagatggttactacaagccaacacaatgtcatggcagtgttggacagtgctggtgtgttgacagatatggaaatgaagtcatgggatccagaataaatggtgttgcagattgtgctatagattttgagatctccggagattttgctagtggcgattttcatgaatggactgatgatgaggatgatgaagacgatattatgaatgatgaagatgaaattgaagatgatgatgaagatgaaggggatgatgatgatggtggtgatgaccatgatgtatacatttgattgatgacagttgaaatcaataaattctacatttctaatatttacaaaaatgatagcctatttaaaattatcttcttccccaataacaaaatgattctaaacctcacatatattttgtataattatttgaaaaattgcagctaaagttatagaactttatgtttaaataagaatcatttgctttgagtttttatattccttacacaaaaagaaaatacatatgcagtctagtcagacaaaataaagttttgaagtgctactataataagtttttcacgagaacaaactttgtaaatcttccataagcaaaatgacagctagtgcttgggatcgtacatgttaattttctgaaagataattctaagtgaaatttaaaataaataaatttttaatgacctgggtcttaaggatttaggaaaaatatgcatgctttaattgcatttccaaagtagcatcttgctagacctagttgagtcaggataacagagagataccacatggcaagaaaaacaaagtgacaattgtagagtcctcaattgtgtttacattaatagtggtgtttttacctatgaaattattctggatctaataggacattttacaaaatggcaagtatggaaaaccatggattctgaaagttaaaaatttagttgttctccccaatgtgtattttaatttggatggcagtctcatgcagattttttaaaagattctttaataacatgatttgtttgcctttctagatttctttatctttctgaccagcaacttagg

SEQ ID NO: 8213 - DNA, 607 bp, Homo sapiens
ctttttggcgagacaatgtgcaaatgacaccgttttgtgctcaccagggcaaagcaagggagcgccctcacttcagcatctcagccctgctaaagaaaaagctgctgggtaacatcctttgtttttgcccagggaagctttagctgtgattcccttcagccggctcctgaatgtcaaagccagcacaggccagccagaagatgacactgagactacaggtttggaaggcggcgttgccatgccaggtgccgaagatgatgtggtgactccaggaaccagcgaagaccgctataagtctggcttgacaactctggtggcaacaagtgtcaacagtgtaacaggcattcgcatcgaggatctgccaacttcagaaagcacagtccacgcgcaagaacaaagtccaagcgccacagcctcaaacgtggccaccagtcactccacggagaaagtggatggagacacacagacaacagttgagaaagatggtttgtcaacagtgaccctggttggaatcatagttggggtcttactagccatcggcttcattggtgcaatcatcgttgtggttatgcgaaaaatgtcgggaaggtactcgccctaaagagct

SEQ ID NO: 8214 - DNA, 691 bp, Homo sapiens
ggcggcggctgccgtagtttcagtataaacaaggaacccgactggttagacagattttgtttttcttcttcccgcgcgctttagctccctgtcctttggtcgcatttgtgggcgcgcggcacgcagccgggaggccgaggactcggagttcacctgcaggaaagtatgcctcagactcctcccttttcagcaatgtttgacagcagtggttacaatcgaaacctctatcagtctgcagaggacagctgtggagggttgtattaccatgacaacaacctcctctctggatccctggaagcactcatccagcacttagtacctaatgtggattactatccagatgtaggtattcatgtttctctgaaacacatccttggcaatgagtagaaattgcagtacagtaggcagggaccatagataatacagaattatatctaggttgctaagaatttttctaacaagaaattgcatattgattatcaagtgcattgaaatcaaatcgagcctggataaggatcagattttggtatactatgtgtatcaatttcttttcaggttagttacaacattgtagatggtctgataccatctaaatgaagtatctgtagagttgattcatgcatatagcttagtccttaaatagaaatgtcagagaacattggatgctcccagaatatgtaatgcctttttt

SEQ ID NO: 8215 - DNA, 672 bp, Homo sapiens
aagttggcaccagagttggggagttttaagaggtttagaagcctggccgtcaatacctacaacagttatggaggcaagggaaacaggcccttgaaaagaaggtaatgtggagtgggtagcttccatattgattaacacggggacggacttaccttccagtgtgagagttacccgaagctccgcgtccgtgatggtctagggggcttccgaggtgatcgggcagtgtcggtcttcagccgctaagccgagaaggagtcagagagacttaggccagagttccgggggctctgcgagtggctgccagctactgccttcctcatcaacaaagtgccccttcctgttgacaagttggcacctttacctctggacaacattcttccctttatggatccattaaagcttcttctgaaaactctgggcatttctgttgagcaccttgtggaggggctaaggaagtgtgtaaatgagctgggaccagaggcttctgaagctgtgaagaaactgctggaggcgctatcacacttggtgtgacatcaagataaagagcggaggtggatggggatggaagatgatgctcctatcctccctgcctgaaacctgttctaccaattatagatcaaatgccctaaaatgtagtgacccgtgaaaaggacaaataaagcaatgaataca

SEQ ID NO: 8216 - DNA, 2461 bp, Homo sapiens
ctcttaaaccaaatgccatttaaatgaccacagactaaatacaaagtaggtaaatgcttacagggaaaggggaaagtggatcaaggtagaaaaaagacaatttgttttaaacactcttaatacaacttgttctctctccccttaaacatgtttaaaacaacgtaaagcacagatgattgtctgaaagaaaaagaaatcatttgcacagcccctgttttccagcttggtgccctttgatgggtggtgagtggtagcgatgtggcccagtgagacggcacagtcgctcttcctgcaggtcagaatcttcctaggctgttgctcttccaaggtactctgagtcctgcgatggtggcctggggttttgtttcctaagaagtagttgccattattttgattcatcctactgttctaaccaaaacaaaaaccaaaaaactccaaatggtaacagatattcatatacccggacacccaagtcagtgagtgtcacgtggcttccagatttgcatctgtgctgcagtagtctttcttcctggcaggtgtacttttgcatgtgatgggagatgccctggggtccgtggttgtggtcatcacggccatcatattctatgtgcttcccctgaagagtgaggacccgtgtaactggcagtgttacattgaccccagcctgactgtcctcatggtcatcatcattttgtcatctgccttcccgcttatcaaggagaccgctgccattctgctacagatggtcccaaaaggagtcaacatggaagagctgatgagtaaactctctgctgtgcctggaattagcagtgtacatgaagtgcacatctgggaacttgtaagtggaaagattattgccaccctgcacatcaagtatcctaaggacaggggatatcaagatgccagcacaaaaattcgagaaatcttccaccatgcgggaatccacaatgtgaccatccagtttgaaaatgtggacttgaaggaacccctggagcagaaggacttactgttgctctgcaactcaccctgcatctccaagggctgtgctaagcagctgtgttgtccccccggggcactgcctctggctcacgtcaatggctgtgctgagcacaatggtgggccctctctagacacatacggaagtgatggcctcagtagaagagacgcaagagaagtggctattgaagtgtctttggatagctgtctgagtgaccacggacaaagtcttaacaaaactcaggaggaccaatgttatgtcaacagaacgcatttttaatctggtactcacataatcagaccatatagacgaggcactttggaaccacaagcttggctcacaaaaagagctttctgggttgtaggcccagactagacttgcagcatgcatgctctgtgttcactaggggttggctgtttgggattttagttaaacgtgtctgtgaatttttatgtaactaactcctttccattcccctgggtgtctcatgctgctctttgactgtttcagcttgaacatgcattttctaaagcaaactgcactagtgtatatatcagggacattaaagtctgggactggggctcaatagctgcggatacagtgttcaaagaagttcttgtttctaaactgattagaacttctagctaatgctcaggtgagatcatagcttaaatacattgaaaaaactaaagtaccacaatagctgtatttttcccaatccccttaacgatcataaaagaggcaagttaagtatttctggcactgaagaaatatcttttttctttgattcatttttgaataaatataaaatgaataactattaaggtagaaaatattctcagaacattctagaggaggtaaaggttagtaggagggcgttggccatctctacattttgtgaggtgagagaaaactaatgtttactttctgctgtgaactgaactgcagctatagaatgtttcaaatgcttaaatatataatacatttttttccatggaagtgagggaatatttcagtttcctgaagtatgacacaaatactcatatactgtcttttagagtcagtatagttggagctgttttcatttagtgctttgataatgatttacttatttttccaaatttcgtttgaattttctttcatatgattgcattgatctatgcagcatttaccagaaaagagtattcctgggatagcagaatgcataacactgagtgttaattcttgtgaaataaataagctagactgccttctctttaattagacatattttaaagtatttattatagttgtcaactagtaactcaatgaaaaagttgatgcccaagggagaaatgagaattagcttaattgctgcctttaatgtgtttttgaggaacttaaaattttctttcatgtcgctgatccatattaccaagttcaaataaaatttttataatcggattcagacccataaccaaacta

SEQ ID NO: 8217 - DNA, 568 bp, Homo sapiens
aagattctttgggctataaagatgaagagtctacttcttctggtgctgatttcaatctgctgggctgatcatctttcagacaactatactctggatcatgacagagctattcacatccaagaaaatggcccccatctacttgtggaagcagagcaagccaaggtgttttcacacagaggtggcaatgttacactgccatgtaaattttatcgagaccctacagcatttggctcaggaatccataaaatccgaattaagtggaccaagctaacttcggattacctcaaggaagtggatgtttttgtttccatgggataccacaaaaaaacctatggaggctaccagggtagagtgtttctgaagggaggcagtgatagtgatgcttctctggtcatcacagacctcactctggaagattatgggagatataagtgtgaggtgattgaaggattagaagatgatactgttgtggtagcactggacttacaaggtgtggtattcccttactttccacgactggggcgctacaatctcaattttcacgaggcgcagcaggcgtgtctggacc

SEQ ID NO: 8218 - DNA, 1511 bp, Homo sapiens
attgactaaacctaactagaagccagaggccaaaggaatctgtcgatatacaagctagcttcccagtggatggagcaggatggagaagaggaagaacgggcctggagggacaaacaaagggttaaaagaaaaggtccatccacatcgtggcgctggggaacgagggggacacattccaccaggacaaccggccgtcggggcttatccgcacttacctggggagaagccctctggtctccggggacgagagcagcttgttgctgaacgcggccagcacggtcgcgcgtccggtgttcaccgagtatcaggccagtgcgtttgggaatgtcaagctggtggtccacgactgtcccgtctgggacatatttgacagtgattggtacacttctcgaaatctaattgggggcgctgacatcattgtgatcaaatacaacgttaatgacaagttttcattccatgaagtaaaggataattatattccagtgataaaaagagcattaaattcagttccagtaattattgctgctgttggtaccagacaaaatgaagagttaccttgtacatgcccactatgtacctcagacagagggagctgtgttagtacaactgaagggatccaacttgcaaaagaactaggagcgacctatcttgaactccacagccttgatgacttctacataggaaagtattttggaggagtgttggagtattttatgattcaagccttaaatcagaagacaagtgaaaaaatgaagaaaagaaaaatgagcaactcctttcatggaattagaccacctcaacttgaacaaccagaaaaaatgcctgtcttaaaggctgaagcgtcacattataactctgacttaaataacttgctgttctgctgccagtgtgtggacgtggtattttacaaccccaatttaaagaaagttgtagaggcccacaagatcgttctctgcgctgtaagccatgttttcatgctgcttttcaatgtgaagagtcccactgacattcaggattccagtatcatccgaactacccaggatctttttgctataaacagagatactgcatttccaggtgctagccatgaatcttcaggcaacccaccattacgagtcattgttaaagacgccctcttctgttcttgtttatcagacatccttcgcttcatttattcaggtatcttgtcaagtggttctggttacttacaatctcataagctttggaaatgaaatgtgcctgtgacactcaagggtactggttagttttacagtggtctttacctaccatctgagattaagattatacatgaaatattatttgctttatatataagaattggtccaagctttctgttttccttacaaatgtacttgcctcatcttttccctatcaatttcattttattgtggtaaaatacatagaacataaattttaccatcttaaccatttttaagaacacagttcagtggaattaaacacattcataatgttgtgtaactatcaccacc

SEQ ID NO: 8219 - DNA, 548 bp, Homo sapiens
attttctgagttcccattatatagtgtcctatgtgtgttgctcttttccagtcagactcattagtagtctggtgtggagctagtagctcagagattgcttttatgaggcggttttggaatcttcatctgcccatgaaaatagaatagtccacttttaaaaaaagatcgtactgagaagcactccacaatgccagactcacctgtggatgtgaagacgcaatctaggctgactcctccaacaatgccacctcccccaactactcaaggagctccaagaaccagttcatttacaccgacaacgttaactaatggcacgagccattctcctacagccttgaatggcgccccctcaccacccaatggcttcagcaatgggccttcctcttcttcctcctcctctctggctaatcaacagctgcccccagcctgtggtgccaggcaactcagcaagctgaaaaggttccttactaccctgcagcagtttggcaatgacatttcacccgagataggagaaagagttcgcaccctcgttctgggactagtgaact

SEQ ID NO: 8220 - DNA, 2186 bp, Homo sapiens
ctagaccaaataaagacctcagactcaggcctgccacgcagttgatttccaaatgggtggaactcttaaaagccccacttgtggccgggtacagagcagttgcctcctggagtcgtgttcagggaattgggattcctttggtaactgccattgaaattgtctccatctggatcctgtcctttatcctggccattcctgaagcgattggcttcgtcatggtaccctttgaatataggggtgaacagcataaaacctgtatgctcaatgccacatcaaaattcatggagttctaccaagatgtaaaggactggtggctcttcgggttctatttctgtatgcccttggtgtgcactgcgatcttctacaccctcatgacttgtgagatgttgaacagaaggaatggcagcttgagaattgccctcagtgaacatcttaagcagcgtcgagaagtggcaaaaacagttttctgcttggttgtaatttttgctctttgctggttccctcttcatttaagccgtatattgaagaaaactgtgtataacgagatggacaagaaccgatgtgaattacttagtttcttactgctcatggattacatcggtattaacttggcaaccatgaattcatgtataaaccccatagctctgtattttgtgagcaagaaatttaaaaattgtttccagtcatgcctctgctgctgctgttaccagtccaaaagtctgatgacctcggtccccatgaacggaacaagcatccagtggaagaaccacgatcaaaacaaccacaacacagaccggagcagccataaggacagcatgaactgaccacccttagaagcactcctcggtactcccataatcctctcggagaaaaaaatcacaaggcaactgtgagtccgggaatctcttctctgatccttcttccttaattcactcccacacccaagaagaaatgctttccaaaaccgcaagggtagactggtttatccacccacaacatctacgaatcgtacttctttaattgatctaatttacatattctgcgtgttgtattcagcactaaaaaatggtgggagctgggggagaatgaagactgttaaatgaaaccagaaggatatttactacttttgcatgaaaatagagctttcaagtacatggctagcttttatggcagttctggtgaatgttcaatgggaactggtcaccatgaaactttagagattaacgacaagattttctactttttttaagtgatttttttgtccttcagccaaacacaatatgggctcaagtcacttttatttgaaatgtcatttggtgccagtattttttaactgcataatagcctaacatgattatttgaacttatttacacatagtttgaaaaaaaaaagacaaaaatagtattcaggtgagcaattagattagtattttccacgtcactgtttatttttttaaaacacaaattctaaagctacaacaaatactacaggcccttaaagcacagtctgatgacacatttggcagtttaatagatgttactcaaagaattttttaagaactgtattttattttttaaatggtgttttattacaagggaccttgaacatgttttgtatgttaaattcaaaagtaatgcttcaatcagatagttctttttcacaagttcaatctgtttttcatgtaaattttgtatgaaaaatcaatgtcaagtaccaaaatgttaatgtatgtgtcatttaactctgcctgagactttcagtgcactgtatatagaagtctaaaacacacctaagagaaaaagatcgaatttttcagatgattcagaaattttcattcaggtatttgtaatagtgacatatatatgtatatacatatcacctcctattctcttaatttttcttaaaatgttaactggcagtaagtcttttttgatcattcccttttccatataggaaacataattttgaagtggccagatgagtttatcatgtcagtgaaaaataattacccacaaatgccaccagaacttacgattcttcacttcttggggttttcagtatgaacctaactccccaccccaacatctccctcccacattgtcaccatttcaaagggcccacagtgacttttgctgggcattttcccagatgtttacagactgtgagtacagcagaaaatctttta

SEQ ID NO: 8221 - DNA, 715 bp, Homo sapiens
gagtttctagtctgttgattggccactgacccgtgctgcaggcacacaaaggaagctgcacccacagcagtctgttgtggatggttgctgagctgcgcattcggcattgggcttgctttgtttcctgccaggcccagcattttcttctaccagatcggcaggcttgtgggcttcttcctaggtccctcccctgcactctgaataggaaagctggaagctgtgctttagagaagctttaagacgccgaaagaaaccagaagagtgagcgccagttgtatgtgcgtggtctccatccgcaaagccggagctgggcgcaacagtgttgacttaaagcattttgacttgttgatgtcaatttggaacagctgaaaaaatacaggaaaataagataaatacgtacatgttgagggtggggacaaaatgaaggttctgaaccagctgccggcttacagtagccatataagcaacagcagcaatgcaccaacctggtggcatggaatattcacatgggagagccgcatgaggccgcccaccacgcttcctgaaggatgcccgtgtggaagaattttgacgtgccagtgtcctcgttctacagggtgttccattcttccgcaatctcagaaaaatgggactaaaagaaactattttgtaaaataagaagacttccatttttaatgaccaacatgtattaagatggacacctactctacgaaac

SEQ ID NO: 8222 - DNA, 657 bp, Homo sapiens
aaatgcttttgcagtggtactgtgctattgggggatcttttacacgatttggctgacacagccaaagctaaaaattgcaaatttctcccacacatattcagaggggaaattggttccttgctgcatattatgcaaacaaaacatcccagtgggatttgcaacccattcctccatttgctaggcactctggagaatgtgaagaatatctgtaagacacggatgaagaggctggacagctccgcctgcctgcatgctgtgggcgacaaggccgtggaattcttctttgcttctgatgcaagcgctatcatagagcacaccaaccgggtcatcttcctggaggacgatgacatcgccgcagtggctgatgggaaactctccattcaccgggtcaagcgctcggccagtgatgacccatctcgagccatccagaccttgcagatggaactgcagcaaatcatgaaaggtaacttcagtgcgtttatgcagaaggagatcttcgaacagccagaatcagttttcaatactatgagaggtcgggtgaattttgaaaccaacacagtgctcctgggtggcttgaaggaccacttgaaggagattcgacgatgccgacggctcatcgtgattggctgtggaaccagctaccacgctgccgtggct

SEQ ID NO: 8223 - DNA, 832 bp, Homo sapiens
cagaaattcataaactttcttaaaccattatgagattttttttttgcaatttttttagcttatcagctatcattagtgttagcgtatattatgtgtggcccaagacaatttttcttcttccaatgttgcccagggaagccaaaagattggacccccttgattctagattgtgaaggatgcatcatctgacggcttttttttcctggtatgtgtgtgtaaagttttccctctcgagtgtccagcacttcctatgatccacaatggacatcacacaagtgagaatgttggctccattgctccaggattgtctgtgacttacagctgtgaatctggttacttgcttgttggagaaaagatcattaactgtttgtcttcgggaaaatggagtgctgtcccccccacatgtgaagaggcacgctgtaaatctctaggacgatttcccaatgggaaggtaaaggagcctccaattctccgggttggtgtaactgcaaactttttctgtgatgaagggtatcgactgcaaggcccaccttctagtcggtgtgtaattgctggacagggagttgcttggaccaaaatgccagtatgtgaagaaattttttgcccatcacctccccctattctcaatggaagacatataggcaactcactagcaaatgtctcatatggaagcatagtcacttacacttgtgacccggacccagaggaaggagtgaacttcatccttattggagagagcactctccgttgtacagttgatagtcagaagactgggacctggagtggccctgccccacgctgtgaactttctacttctgcggttcagtgtcca

SEQ ID NO: 8224 - DNA, 354 bp, Homo sapiens
aaaaccatcattcacagcatcaatgaaaaagattgtccgaagcctccaaacattcccatgatcatgttaggggtttccctggctattcttctcatcggggttgtcctactgtgcatctggaagctactggtgtcatttcatgatcgtaaagaagttgccaaatttgaagcagaacgatcaaaagccaagtggcaaacgggaaccaatccactctacagaggatccacaagtacttttaaaaatgtaacttataaacacagggaaaaacaaaaggttggtttaagataataataggacatctgcagataagtcatcctctacatgaaggtgacagactgttggcagtttcaaaat

SEQ ID NO: 8225 - DNA, 1153 bp, Homo sapiens; identical to SEQ ID NO: 6923

SEQ ID NO: 8226 - DNA, 4196 bp, Homo sapiens
gtagggacctacagcgggcgcggcgccggcggtctgcggccggcggtgtagacgccccttcgccgggacctggcacccgaatccggcctgccgggcctctttgtgcagcgccttgctgacgcccagggttctgatgtagaagcctacaccagggcctgaggttgtgaaactcatggcagtccacgcctgagaagagaaggcctgaaagagaaggaagagcccatgggacttgccacggttttgacttacatctgcaactccaaggctacaggcaggaagtaagaacagtgctcaagtggcagcagatactgactatggcttcatttcacagcttcacacagcagggtagcagaaaacaaagaatgtaagattggacccagttgcagctgttcaccaactctgtgatcttcaaaaagccatatagcttctccagacctgttaatcagggaagaagcagataactgaaggctggctttgagaagtttcgaggtaacataggaacctgctcatgcaggcactctttccatctgacttgggccaaggtgctccgtgattgacaagcagccagcctctgggagagcactctgatcagatcattgatagaacattcactactctacttatcatacccatttacttatctccatcttctgttagactccttaaaaacagcagcccacagcaggtgtggggataaaacagtcctgggcagtgctcattgtactcacactatgccaggcactgtgccaggaacattcaaatttctaagaatctacaaagtagatacctcattatacatcttacagagagcatcattggtgtttccaaggtcacagggctaggcaagggtggaaccctgagtctgcttgtctgtttgccccatgacagcccaggggtggtggcctcaccccacctccaggcacccacaagaatataaaatcttgtacaaggatgtcgatattactattgccattcccaagtgcacctgcacctgtagtatcaggtggtttgcagccttggctgcatagctgcatatgagaatcacctgggaagcttttaaagatcccagtatccccacctcttccccagttacagtggagtcttgcgggtggtgggggacatcattatttttgaagcttccaagtaattctggtgtgcagtggggtgaccagctgtcccagggacctcctttaaaaaataatatcccgggcacatgacaggccaattgccctaatgcaaccaaggttaagaactactggtttaatgggagatattttttctgtgcttgattatactgttttattaaactctgaatccatttctttctgcaaatttttaaggcaaaaaagaaatgtgaaaatatacgtctcatttttagcaccttcagagacccggagtcatttgatgtgcttcatgacataaaattttgtaatatgccgtgtgatactaccttatttttaccatatatgtatttttaatgcttaacaagagcatatttgctctttcacatttttttttcacatacaaagttttagacatcaagcactctaaattcttttttacaaatatttttttcttaaaatgttaagaaaaagcctataatatcacttcctttgtttcctgatgtagactcagttgatgtgcacagcagtgtcaagtcaatctccaaaatactccctgtagacagggtggggagaagaccctcacttcctgccgactaatgaactcatgttgatacagacctttgcctcatcagattcatttgttaagctaaccagtgtctgcttctctggacattactggactcttctacctgtgaagccatcttaaaaaaatatattgactgatttcttaacgaaacatctactctttgccaagcataaagttacctcccacttgcatacacccttttctcatttgtcctcacatcagctgtataaatgagaaatattcacattttataagtgagaacattcaggctcagataggttaacaagtttgaaatcatgtgctagtaaaccaaacacctaggttttgaaccttgttcttcttgtcccaaggtcattattctctactgtgttacactcagctgctttcacctggaaaagcagaggaatcaggctgtctcctgcagctgtcttggtccattctgctgcccaagcagtacacttggtttcagatggaaatctaggatcccaagcatgggtacatttgtcggcagcatttggaagtatttttcgtcatcaggatggcagtcaatttgcaattcagtcatctcagtgcaaggtagtttggcaaaaagattatgacacttaatggatttttttcctcttttaaatctgtttacccagcattttgtagtataatgcaatgtaataacattgcattattttgagcatagtttagaagccaagaagatgctttcaaacagctgacataattcagttatggcccagatgtcctgccttccccatcacacattcatattaatggtcttagaaagctgtttctgaggcaacagtttcttcctcaatatcatcctactggggaaattttggcagttgatgtctaatgttgatttttttttcctgattgattttaattgttcactgggcactttggggtagaattgttttaaaaatttggttactgggaaagctagacaagcctttgctatggtgaaagagacagaaggaatatagatataatttgtaagtggttatgccattgggcttaatgctttgcatacattatctagtttgcatctcctgatcgccctttaagtttgcttacggtaaagcattattccttgcttggcaatgcacagagaaaaattatttgctgaaggaccctgcaaatgagggacaggatcagagttggaactgtaaaccctgccactccatttcatgtgatcttcatgggtacagcagctataccctgccccagcaatgagtatggtagagccacattcaaaggcggactttggggtcagcattcctgaaaagagctgcttaagtttgcttctacatccaaaaacgatgcagtcacagtcaactaacactgagcttgctgggcatctcctgaacagaaatgtatgtggtggtccatgtagcatgtatgcgatataattggccacccacctttccttttcacattaacatttatcacagaaacacattcatttgctacagggatatttcacaatttggctgaactttgagagaagtgggtgaggaaaaggtagtttcgtaactagtttatatataaacctaaattgtagtgagtactcttgtaagtggagcatcttttctatggtaattataaatggctgttagcccctttgcactaaagctaggtgggtggttttgccacagaggtaaattatctttcgggcggtataaccaaacaaataaaatataaagtgagattcagggcatgttctgaatacagcagttaattaggcagctaagaaaactgtattttagcccctctgactatgtgattggtatttttttaaattaaaaaatggaaaataatatttttaacaggttatgatatgtcagtcatttaatcctcacagtaactctgtggggtaggtaggtactgtttctatctcattttacaggtaaggaatcaaaacagtgggtatacccaggttgtatatctagaaagtgatagagctgggattttaaactttataatctgattccagaatctctacctttaaacactatgttaccacttacttctcttcaaattttattgagcattagatgtttccagtatttagaagtcaaatgcttcgtttttaataggaacttacacagtcttttatgtttttttatagccctcaatgtcactgatgtggattctcccaaactcgatactttgtttgtttttatgtccccataataagtctttaagaaaacagggcaagtgagctcaaaatcaaaagaaaacccaccaacagtgaatgcattcagggctatttccaggtctttcttttgaagaaagataagactcagtccagagagcacatctgtgacacaccgtgcctcttgcctttggtgcgtggcagtcatctttggctcatgctgtaccttattctacattagaaaactcactgtatgttgctaaataattttttgaaaacaggcagattaataaatggacatcttatttattgcaccataaaa

SEQ ID NO: 8227 - DNA, 675 bp, Homo sapiens
tgggccacaacccgctctagcttgaaggcaccaccgcaaaggtcagccagagggggatacagggaacacccctatggtagatattgaaggtccttcccacctgtgacctcacctcaaagacaattcatagcctgtggtctccacataaacagcaacaagacaagtacccacaaacaaagaacacataattgaataaccgatgtgatttgctaagaaggatggaggtgaagatgtatgatagaaaaacgaaaaactggaataaacccaagactggctgtttggaggtttaatgtttttaacaatggaggccaaaaaagaagataatttggatttgaaccaatgtattttcttcatctcaactcacctcaccactacggatccaagcctgacacagagcctaacagaaatactttcctccaaatacaatcctgttcaccatggaagacattaaaaccttcagtggttgctgctgggggccttcaccaaaatgcagccattcaccttgctgctgggggccttcaccaaaatgcagccattcacctttgcttttgctctacctacaaaaaatgttcattggctcactcccgaggtcaactttgattcaaagatagtcttcagttaccaaaccttatcacatgactgtaaaactagataataaacaagtgtttaaaatat

SEQ ID NO: 8228 - DNA, 687 bp, Homo sapiens
tgcttccttatgaggaagtgctgaaatgatcagaccctcagaatcatagtgaacctgaaatgcaaaaatccagttttgcagaagaagagaatctgggcatgattccactgcagatgtattctccgctttgcaaaaggtttcacaatgggttcctttaaatatcaaactttctggctcacttaaaatatgaattttatttcaaattagaaaatagaatttacacttcacttttgaggaaatgcatgtggtctgtaaactaggtcacagctgtgttaccccggagggtaagttgtatagtggcatgcagggagggagggaccccaattattgaaggaaatgtccatacctatgatttccctctttgtactgtatttgtagaaggagcaacacacagtgagcatcgagctctcatgtctgaactcaagatcctcattcatattggtcaccatctcaatgtggtcaaccttctaggtgcctgtaccaagccaggagggccactcatggtgattgtggaattctgcaaatttggaaacctgtccacttacctgaggagcaagagaaatgaatttgtcccctacaagaccaaaggggcacgattccgtcaagggaaagactacgttggagcaatccctgtggatctgaaacggcgcttggacagcatcaccagtagccagagctcagccagct

SEQ ID NO: 8229 - DNA, 560 bp, Homo sapiens
agaccggccgacgcgggccaccccgctctcctcgccgccgcggcggcaggcgcggggccgcgccgcgaggcctgatccctgcagcgcgggcaggcggcgtcgcagagcggagctagctggatgcgtccggactcctgcaggtgagagtgattttccagtgattgctttggcctgtacaaccagagaacaggattcttcccttctttttggccaccaaatgcctatgtgcaccacacattccagtgtgctgagaagggcagagcttcttggatgatgatggacgtcccaccgggcaggatgaaggcagagcgtgtggcatctccacctcaagggtgggtttataaactccttctatagatgaagacttcacctgcccaaggtcatgcagataagaagaggcagctcagacacaagttttcagaatcctagtctttccctcttttttgctagttgatgctgataattcagcatgaataagaggacatgctgtttttgttttgttaagttcaacattgaaacgttgcattcagtttatgaatgctctggaatagagcaccctg

SEQ ID NO: 8230 - DNA, 566 bp, Homo sapiens
tgtaccatatcatgctctttacattctttgcttttggattttagctgtcggttacaattgcatattgaatattacaacaaggactgctaactctgtaagtctaaaaaatcttattgcaatatatatatagtaaagaaactagatatttgagattgatgtttgttttcactataaaggagaaattgctcttaaaatctgaacttttaaataaatttgtccttacagaaattacgaggccaaactgaagctctctatatactaacaaaatgtaacagtactcgttttgaatttatatttacaaatttggttcctggaagccctagactttttacttctgtgatggcagtacacagagcttatgaaacttctaaaatgtatcgtgattttaaattaagaagtgcactaattcagaacaagcaactaagactgttgccacaagaacatgtatatgataaaataaatggagtttggaatttatccagtgatcaggtattgtgcaaagagctagtgaaccttttgggacagtgttttggtaatcatttttccattcatcattggatttatat

SEQ ID NO: 8231 - DNA, 497 bp, Homo sapiens
ggtcgagactggcagcagacagggattagggtagggatgtgacaaggcgaggaagggaggtggcagagctgctcaccttggagatagccagagggacagggaacctggggacgggggatggtgccagctgtggccctggctcctggggcctccaggaagggaagaaggaaccagggcagagcccacagccaggagctcaccttctccaggttggtgttgtccagccagagggtctccaggttgcttatggaaccacagagaacagtcccgtgacattcgcgcacttccctgaggacactgtggagcagaaggcagaaagcgtgggcagaattatgcctcacacggagagatgtcgccacaatgaatgagcagggcttctgcaagatcgtgggccgctctaaggatatgatcatccggggtggtgagaacatctaccccgcagagctcgaggacttctttcacacacacccgaaggtgcaggaagtgcaggtggtggg

SEQ ID NO: 8232 - DNA, 643 bp, Homo sapiens
aacatgagaagaattggaagtagcctatagcaagtagaaacacgaactgattctattgacttaattacatatactttataaatcagactctggtcagtagatttgagggcaacatcttgtttctgctgtggaattaaaaacatagacttatatgacaataaatttctatgctaaatcaaggtttttttcacttctgactttaaggttcttctccagagagaagaagctgtcacagacttattttttatgtttctgtatctgttgccatcttgcttgtagatttttaatttttcagaaaggtagatggaaacatttagtgttgcattttgaagactgaatcttgtgaatctacaggagcataaatgtcctacctcttgggacagttcctaccatgaattcagatcaagtatgtgtgtctactctaagaagattatgtttgtttttattttcagtttgtcttcgctcttttcaaactgggttattcactgctgcacgtcagtcaactaatgcttatcctgacctaagaagctgtgtcaatgccattccagaccagtgtagtcctctgccatgcaatgaagatggatatatgagctgcaaagatggaaaagcttcttttacttgcacttgtaaaccaggttggcaa

SEQ ID NO: 8233 - DNA, 3662 bp, Homo sapiens
gggaagcaccatgcagtttgtatcctgggccacactgctaacgctcctggtgcgggacctggccgagatggggagcccagacgccgcggcggccgtgcgcaaggacaggctgcacccgaggcaagtgaaattattagagaccctgagcgaatacgaaatcgtgtctcccatccgagtgaacgctctcggagaaccctttcccacgaacgtccacttcaaaagaacgcgacggagcattaactctgccactgacccctggcctgccttcgcctcctcctcttcctcctctacctcctcccaggcgcattaccgcctctctgccttcggccagcagtttctatttaatctcaccgccaatgccggatttatcgctccactgttcactgtcaccctcctcgggacgcccggggtgaatcagaccaagttttattccgaagaggaagcggaactcaagcactgtttctacaaaggctatgtcaataccaactccgagcacacggccgtcatcagcctctgctcaggaatgctgggcacattccggtctcatgatggggattattttattgaaccactacagtctatggatgaacaagaagatgaagaggaacaaaacaaaccccacatcatttataggcgcagcgccccccagagagagccctcaacaggaaggcatgcatgtgacacctcagaacacaaaaataggcacagtaaagacaagaagaaaaccagagcaagaaaatggggagaaaggattaacctggctggtgacgtagcagcattaaacagcggcttagcaacagaggcattttctgcttatggtaataagacggacaacacaagagaaaagaggacccacagaaggacaaaacgttttttatcctatccacggtttgtagaagtcttggtggtggcagacaacagaatggtttcataccatggagaaaaccttcaacactatattttaactttaatgtcaattgtagcctctatctataaagacccaagtattggaaatttaattaatattgttattgtgaacttaattgtgattcataatgaacaggatgggccttccatatcttttaatgctcagacaacattaaaaaacttttgccagtggcagcattcgaagaacagtccaggtggaatccatcatgatactgctgttctcttaacaagacaggatatctgcagagctcacgacaaatgtgataccttaggcctggctgaactgggaaccatttgtgatccctatagaagctgttctattagtgaagatagtggattgagtacagcttttacgatcgcccatgagctgggccatgtgtttaacatgcctcatgatgacaacaacaaatgtaaagaagaaggagttaagagtccccagcatgtcatggctccaacactgaacttctacaccaacccctggatgtggtcaaagtgtagtcgaaaatatatcactgagtttttagacactggttatggcgagtgtttgcttaacgaacctgaatccagaccctaccctttgcctgtccaactgccaggcatcctttacaacgtgaataaacaatgtgaattgatttttggaccaggttctcaggtgtgcccatatatgatgcagtgcagacggctctggtgcaataacgtcaatggagtacacaaaggctgccggactcagcacacaccctgggccgatgggacggagtgcgagcctggaaagcactgcaagtatggattttgtgttcccaaagaaatggatgtccccgtgacagatggatcctggggaagttggagtccctttggaacctgctccagaacatgtggagggggcatcaaaacagccattcgagagtgcaacagaccagaaccaaaaaatggtggaaaatactgtgtaggacgtagaatgaaatttaagtcctgcaacacggagccatgtctcaagcagaagcgagacttccgagatgaacagtgtgctcactttgacgggaagcattttaacatcaacggtctgcttcccaatgtgcgctgggtccctaaatacagtggaattctgatgaaggaccggtgcaagttgttctgcagagtggcagggaacacagcctactatcagcttcgagacagagtgatagatggaactccttgtggccaggacacaaatgatatctgtgtccagggcctttgccggcaagctggatgcgatcatgttttaaactcaaaagcccggagagataaatgtggggtttgtggtggcgataattcttcatgcaaaacagtggcaggaacatttaatacagtacattatggttacaatactgtggtccgaattccagctggtgctaccaatattgatgtgcggcagcacagtttctcaggggaaacagacgatgacaactacttagctttatcaagcagtaaaggtgaattcttgctaaatggaaactttgttgtcacaatggccaaaagggaaattcgcattgggaatgctgtggtagagtacagtgggtccgagactgccgtagaaagaattaactcaacagatcgcattgagcaagaacttttgcttcaggttttgtcggtgggaaagttgtacaaccccgatgtacgctattctttcaatattccaattgaagataaacctcagcagttttactggaacagtcatgggccatggcaagcatgcagtaaaccctgccaaggggaacggaaacgaaaacttgtttgcaccagggaatctgatcagcttactgtttctgatcaaagatgcgatcggctgccccagcctggacacattactgaaccctgtggtacagactgtgacctgaggtggcatgttgccagcaggagtgaatgtagtgcccagtgtggcttgggttaccgcacattggacatctactgtgccaaatatagcaggctggatgggaagactgagaaggttgatgatggtttttgcagcagccatcccaaaccaagcaaccgtgaaaaatgctcaggggaatgtaacacgggtggctggcgctattctgcctggactgaatgttcaaaaagctgtgacggtgggacccagaggagaagggctatttgtgtcaatacccgaaatgatgtactggatgacagcaaatgcacacatcaagagaaagttaccattcagaggtgcagtgagttcccttgtccacagtggaaatctggagactggtcagaggtaagatgggagggctgttatttcccctaggtcatctcttacattctagttctggtgctctctatctgtttaagacaaacccttgtgcacctttctcccacctctccctttctcccttgtctcccttgagaaaacaactccagttctctgcctgcaccatgactgtcgtactggatgtaactagtctaccagtgacctcagggcactttgggcttggctagatcactcactgttgtagcttctgttgtgattttgaagttgcagtccatcaccttccctcctctttgagccctagctaagtcactgaaaggaaatcatggatttattaatcataaagctatactagctcacatctgaagtcaacatgaagtttcctacttccttgtctttgaaataagagaattagaccccagggagtgacctctctgacttacccatccaactgcaagaaaaaaaaataaaa

SEQ ID NO: 8234 - DNA, 11132 bp, Homo sapiens
ggcagttagggcaactggaaggctgggagctgaaatcacctgaagtctcattcactcacatgtctgatggttgatattgtctatcagattcttttttgtctccttctctgcaagaggctggcaccagatcacctcctgagtagagcagacattccaaaggatgtcctgccaacaataatggaaagctggatacaactgaatatgtaaaatgatgttaatgaagaattgaagagcactgtatctagttttctgctctccccttattttgaatcaaacccaggcatcctatcatttcatctataaagactttagttcctaaaagtggaattgctggatcaaagggtaaaggcataggcaattctagagcatttagatttaatgtgatggacaggaatgaaccatgaagccacgagtgtttgatttttaaattgtgatattccactaaatgagaaatgaccaggacttcacagagatttcatgaaaggagggccacaaaggaagaacccagagcaggccggtgagaggcactctaagagctttccaatatccgtcttcggagcgcacgggaatccgccgagctctgcgtgcaggcccttttttcttttgaggttcacattttttgaaattttacgccagggcttttgtaatttcctcccccgcccgctgacggtcctggagtcgctcggggctttaggccggttatgcaacgtgtaccgctcggggctgccggctgcacctccgccgcgcctcgccgctcactgcgctagacccggcgccccgcgtctcgcttcgcgggcagtcagggggccggcgctctgtcgaggtctccagctagagcagggagcccgagcccgagggagtccccggagccgacgaagggcttattagaccctgactcttttctgaggcgcgcagattttgtctttgatcactccctctccgcgggtctacggccgcgcgctttcggcgccggcgatggggagaagacggaggctgtgtctccagctctacttcctgtggctgggctgtgtggtgctctgggcgcagggcacggccggccagcctcagcctcctccgcccaagccgccccggccccagccgccgccgcaacaggttcggtccgctacagcaggctctgaaggcgggtttctagcgcccgagtatcgcgaggagggtgccgcagtggccagccgcgtccgccggcgaggacagcaggacgtgctccgagggcccaacgtgtgcggctccagattccactcctactgctgccctggatggaagacgctccctggaggaaaccagtgcattgtcccgatttgtagaaatagttgtggagatggattttgttcccgtcctaacatgtgtacttgttccagtgggcaaatatcatcaacctgtggatcaaaatcaattcagcagtgcagtgtgagatgcatgaatggtgggacctgtgcagatgaccactgccagtgccagaaaggatatattggaacttattgtggacaacctgtctgtgaaaatggatgtcagaatggtggacgttgcatcggacccaaccgctgtgcttgtgtttatgggttcactggtccacagtgtgaaagagattacaggacaggcccgtgtttcactcaggtcaacaaccagatgtgccaagggcagctgacaggcattgtctgcacgaagactctgtgctgtgccaccattggacgggcgtggggccatccctgtgagatgtgtccagcccagcctcagccctgccgacggggtttcatccccaacatccgcactggagcttgccaagatgttgatgaatgccaggctatcccagggatatgccaaggaggaaactgtatcaatacagtgggctcttttgaatgcagatgccctgctggtcacaaacagagtgaaactactcagaaatgtgaagacattgatgagtgcagcatcattcctgggatatgtgaaactggtgaatgttccaacaccgtgggaagctatttttgtgtttgtccacgtggatatgtaacctcaacagatggctctcgatgcatcgatcagagaacaggcatgtgtttctcgggcctggtgaatggccgctgtgcacaagagctcccggggagaatgacgaaaatgcagtgctgctgtgagcctggccgctgctggggcatcggaaccattcctgaagcctgtcctgtcagaggttctgaggaatatcgcagactttgcatggatggacttccaatgggaggaattccagggagtgctggttccagacctggaggcactgggggaaatggctttgccccaagtggcaatggcaatggctatggcccaggagggacaggcttcatccccatccctggaggcaatggcttttctcctggcgttgggggagccggtgtgggggccgggggacagggacctatcatcactggactaacaattctgaaccagacaatagatatctgtaagcatcatgctaacctttgtttaaatggacgctgtataccaactgtctcaagctaccgatgtgaatgcaacatgggttataagcaggatgcaaatggagattgtatagatgttgatgaatgcacatcaaatccctgcactaatggagattgtgttaacacacctggttcctattattgtaaatgtcatgctggattccagaggactcctaccaagcaagcatgcattgatattgatgagtgcatccagaatggggttctttgtaaaaacggtcgatgcgtgaacacagatggaagtttccagtgcatttgcaatgccggctttgaattaactacagatggaaaaaactgtgttgatcatgatgaatgtacaactaccaacatgtgtttgaatggaatgtgcatcaatgaagatggcagcttcaagtgcatctgcaaaccaggatttgtcttggctccaaatgggcgttactgtactgatgttgatgaatgccagaccccaggaatctgcatgaatgggcactgcatcaacagtgaagggtccttccgctgtgactgtcccccaggcctggctgtgggcatggatggacgtgtgtgtgttgatactcacatgcgcagtacctgctatggaggaatcaagaaaggagtgtgtgtgcgtcctttccccggtgcagtgaccaagtccgaatgctgctgtgccaatccagactatggttttggagaaccctgccagccatgccctgcaaaaaattcagctgaattccacggcctttgtagtagtggagtaggtatcactgtggatggaagagatatcaatgaatgtgctttggatcctgatatatgtgccaatgggatttgtgaaaacttacgtggtagttaccgttgtaattgcaacagtggctatgaaccagatgcctctggaagaaactgtattgacattgatgaatgtttagtaaacagactgctttgtgataacggattgtgccgaaacacgccaggaagttacagctgtacgtgcccaccagggtatgtgttcaggactgagacagagacctgtgaagatataaatgaatgtgaaagcaacccatgtgtcaatggggcctgcagaaacaaccttggatctttcaattgtgaatgttcgcccggcagcaaactcagctccacaggattgatctgtattgacagcctgaaggggacctgttggctcaacatccaggacagccgctgtgaggtgaatattaatggagccactctgaaatctgaatgctgtgccaccctcggagccgcctgggggagcccctgtgagcggtgtgaactagatacagcttgcccaagagggcttgccaggattaaaggtgttacgtgtgaagatgttaatgagtgtgaggtgttccctggcgtttgtccaaatggacgctgtgtcaacagtaagggatcttttcattgcgagtgccctgaaggccttacgttggatgggactggccgtgtatgtttggatattcgcatggagcagtgttacttgaagtgggatgaagatgaatgcatccaccccgttcctggaaagttccgcatggatgcctgctgctgtgctgtcggggcggcttggggcaccgagtgtgaggagtgccccaaacctggcaccaaggaatacgagacgctgtgcccccgcggggctggctttgctaaccgaggggatgttcttactgggcggccattttacaaagacatcaatgaatgcaaagcatttcctgggatgtgcacttatgggaagtgcagaaatacaatcggaagcttcaaatgccgttgcaatagtggctttgctctagacatggaggaaagaaactgcacggacatcgacgagtgcaggatttctcctgacctctgtggcagtggaatctgcgtcaatacaccgggcagctttgagtgcgagtgcttcgaaggctatgaaagtggcttcatgatgatgaagaactgcatggacattgacgaatgtgaacgtaaccctctcctttgtaggggtggcacctgtgtgaacactgagggcagctttcagtgtgactgcccactgggacacgagctgtcaccatcccgtgaggactgtgtggatattaatgaatgctccctgagtgacaatctctgcagaaatggaaaatgtgtgaacatgattggaacctatcagtgctcttgcaatcctggatatcaggctacgccagaccgccagggctgtacagatattgatgaatgtatgataatgaacggaggctgtgacacccagtgcacaaattcagagggaagctacgaatgcagctgcagtgagggttatgccctgatgccagatgggagatcgtgtgcagacattgatgaatgtgaaaacaatcctgatatctgtgatggcggccagtgtaccaacattcctggagagtatcgctgcctctgctatgatggcttcatggcttccatggacatgaaaacatgcattgatgtcaatgaatgtgacctaaattcaaatatctgcatgtttggggaatgtgagaacacaaagggatccttcatttgccactgtcagctgggttactcagtgaagaaggggaccacaggatgtacagatgtggatgagtgtgaaattggtgctcataactgcgacatgcatgcctcatgtctgaatatcccaggaagcttcaagtgtagctgcagagaaggctggattggaaacggcatcaagtgtattgatctggacgaatgttctaatggaacccaccagtgtagcatcaatgctcagtgtgtaaataccccgggctcataccgctgtgcctgctccgaaggtttcactggtgatggctttacctgctcagatgttgatgagtgtgcagaaaacataaacctctgtgagaacggacagtgccttaatgtcccgggtgcatatcgctgcgagtgtgagatgggcttcactccagcctcagacagcagatcctgccaagatattgatgaatgctccttccaaaacatttgtgtctttggaacatgtaataacctgcctggaatgtttcattgcatctgcgatgatggttatgaattggacagaacaggagggaactgtacagatattgatgagtgtgcagatcctataaactgtgtcaatggcctatgtgtcaacacgcctggtcgctatgagtgtaactgcccacccgattttcagttgaacccaactggtgtgggttgtgttgacaaccgtgtgggcaactgctacctgaagtttggacctcgaggagatgggagtctgtcttgcaacaccgagatcggggtgggcgtcagtcgctcttcatgctgctgctctctgggaaaggcctggggaaacccctgtgagacatgcccccctgtcaatagcactgaatattacaccctgtgtcccggaggtgaaggcttcagacctaaccccatcacaatcattttagaagacattgacgaatgccaggagttaccaggtctctgccagggtggaaactgcatcaacacttttgggagcttccagtgtgagtgcccacaaggctactacctcagcgaggatacccgcatctgtgaagatattgatgagtgttttgcacatcctggtgtgtgtgggcctgggacctgctataacaccctgggaaattacacctgcatttgcccacctgagtacatgcaggtcaatggaggccacaactgcatggacatgagaaaaagcttttgctaccgaagctataatggaaccacttgtgagaatgagttgcctttcaatgtgacaaaaaggatgtgctgctgcacatataatgtgggcaaagcctggaacaaaccttgtgaaccatgcccaactccaggaacagctgactttaaaaccatatgtggaaatattcctggattcacctttgacattcacacaggaaaagctgttgacattgatgaatgtaaagagattccaggcatttgtgcaaatggtgtgtgcattaaccagattggcagtttccgctgtgaatgccctacaggattcagttacaatgacctgctgttggtttgtgaagatatagatgagtgcagcaatggtgataatctctgccagcggaatgcagactgcatcaatagtcctggtagttaccgctgtgaatgtgccgcgggtttcaaactttcacccaatggggcctgtgtagatcgcaatgaatgtttagaaattcctaacgtttgcagtcatggcttgtgtgttgatctgcaaggaagttaccagtgcatctgccacaatggctttaaggcttctcaggaccagaccatgtgcatggatgttgatgagtgcgagcggcatccatgtggaaatggaacttgtaaaaacaccgttggatcctataactgtctgtgctacccagggtttgaactcactcataataatgattgcctggacatagatgagtgcagttccttttttggtcaggtgtgcagaaatggacgttgttttaatgaaattggttctttcaagtgtctatgtaacgaaggttatgaacttaccccagatggcaaaaactgtatagacactaatgagtgtgtcgcccttcccggctcttgctctcctggtacctgtcagaatttggagggatccttcagatgcatctgtcccccagggtatgaagtaaaaagcgagaactgcattgatataaatgaatgtgatgaagatcccaacatttgtctttttggttcctgtactaatactccagggggcttccagtgcctctgcccccctggctttgtactatctgataatggacggagatgctttgatactcgccagagcttctgcttcacaaattttgaaaatggaaagtgttctgtacccaaagctttcaacaccacaaaagcaaaatgctgctgtagtaagatgccaggagagggctggggggacccctgtgagctgtgccccaaagacgatgaagttgcatttcaggatttgtgtccatatggccatggaactgtccctagtcttcatgatacacgtgaagatgtcaatgagtgtcttgagagcccaggcatttgttcaaatggtcaatgtatcaacaccgacggatcttttcgctgtgaatgtccaatgggctacaaccttgactacactggagtacgctgtgtggatactgatgagtgttcaatcggcaatccgtgtggaaatggtacatgcaccaatgttattgggagttttgaatgcaattgcaatgaaggctttgagccagggcccatgatgaattgtgaagatatcaacgaatgtgcccagaacccactgctgtgtgctttccgctgcatgaacacttttgggtcctatgaatgcacgtgcccgattggctatgccctcagggaagatcaaaagatgtgcaaagatctggatgaatgtgctgaagggttacacgactgtgaatctaggggcatgatgtgtaagaatctaatcggcaccttcatgtgcatctgccctcctggaatggcccgaaggcccgatggagaaggctgtgtagatgaaaatgaatgcaggaccaagccaggaatctgtgaaaatggacgttgtgttaacattattggaagctatagatgtgagtgtaatgaaggattccagtcaagttcttcaggcactgaatgccttgacaatcgacagggtctctgctttgcagaggtactgcagacaatatgtcaaatggcatccagtagtcgcaatctcgtcactaagtcagaatgctgctgtgatggtgggcgaggctggggccaccagtgcgagctttgcccacttcctggaactgcccagtacaaaaagatatgtcctcatggcccaggatatacaactgatggaagagatattgatgaatgtaaggtaatgccaaacctctgcaccaatggtcagtgcatcaataccatgggctcattccgatgcttctgcaaggttggctacaccacagacatcagtggaacctcttgtatagaccttgatgaatgctcccagtccccgaaaccatgcaactacatctgcaagaacactgaggggagttatcagtgttcatgtccgagggggtatgtcctgcaagaggatggaaagacatgcaaagaccttgatgaatgtcaaacaaagcagcataactgccagttcctctgtgtcaacaccctgggggggtttacctgtaaatgtccacctggtttcacacagcatcacactgcttgtatcgacaacaacgaatgtgggtctcaaccttcgctttgtggagcaaagggaatctgtcaaaacactccaggcagtttcagctgtgaatgccaaagagggttctctcttgatgccaccggactgaactgtgaagatgttgatgaatgtgatgggaaccacaggtgccaacacggctgccagaacatcctgggtggctacagatgtggctgcccccaaggctacatccagcactaccagtggaatcagtgtgtcgatgagaatgaatgctccaatcccaatgcctgtggctctgcttcctgctacaacaccctggggagttacaagtgcgcctgcccctcggggttctccttcgaccagttctccagtgcctgccacgacgtgaatgagtgctcgtcctccaagaacccctgcaattacggctgctctaacacggaggggggctacctctgtggctgcccccctgggtattacagagtgggacaaggccactgtgtctcaggaatgggatttaacaaggggcagtacctgtcactggatacagaggtcgatgaggaaaatgctctgtccccagaagcatgctacgagtgcaaaatcaacggctattctaagaaagacagcaggcagaagagaagtattcatgaacctgatcccactgctgttgaacagatcagcctagagagtgtcgacatggacagccccgtcaacatgaagttcaacctctcccacctcggctctaaggagcacatcctggaactaaggcccgccatccagcccctcaacaaccacatccgttatgtcatctctcaagggaacgatgacagcgtcttccgcatccaccaaaggaatgggctcagctacttgcacacggccaagaagaagctcatgcccggcacatacacactggaaatcactagcatccctctctacaagaagaaggagcttaagaaactggaagagagcaatgaggatgactacctcctaggggagcttggggaggctctcagaatgaggctgcagattcagctctattaacccttcacagacttgggcccaggctcaaatcctagcacagccagtctgcagaagcatttgaaaagtcaaggactaattttaaagaggaaaaataataataactcttgtttctttcctccctgtcttagactttgaatgttgaccctcacagggagggataatttagactctggtatggccaaagatttgagcacaaaggcaaccgtggttactgtattttttatataacttcattttaaaatatattaaaagaaacctaaatgttcaagatatcagcatatggcactaaatgcacaaaaataatgtgagctttttttttttttcctgttagcagtctgtaacactttgggtattttgctatagttgctaattaaaaaaatatagatgtttatttatttttaatgcagtaatatatggagaaatgaacaaactatgtaaacaaaaagggaaactcacttgtttttctttagatttataaatttgagctattttttttagaggtgctttttaaaaatccaatagatacaagagatgtttcctttggttttctgccagtcatccagctgatacacacctgatgattttaaagaaagccacacagagctgaatgggcagtgtaatcaataatttaaaaaacatgaatgtcattagatcctttataacgtagatcgaagccaaagcagctcatttgtgacaacatttcatatcaccagacacaccaggcaacagaagttgaagcacaaccactgtagcaaaataccttgactgcttgtgagaccattagcattgcaggccaaaccgtactgtatttccttctcataacctcaaggaaccatatgtgctacccacaacacctcattcttacccagggtgcgctgcgtcctcatggtactgtaggcagctgaagaaccgccgttcccttgaaagggaacacctggcattctgtggtgtttcgtgctgtcttaaataatggtgcatttattatgttcaagttatttcaggattgccatatgtgcaaacaaatcatgcaatgcagccaaggaatatatgttgttgttgttgttttaaacccattttttttttagaattttcattaatactgtagttatacaccatatgcctcattttatcatagcctattgtgtatgaaagatgtttgtacaatgaattgatgtttagtttgctttagtcatttaaaaagatattgtaccaggatgtgctattaagagcacgtatccattattcttctcaacccaagaacctgtttcctggaccagtgaccaaacctcatatgtgaaatggccaaagcacatgcaggctcctggttgttcctctcaaacctgtgctgaccaaagattagtaaccagttatacccagtattttgaggttttattgtttttttaataactaaaaagaaa

SEQ ID NO: 8235 - DNA, 422 bp, Homo sapiens
tcatcaacccactaatttggtcctacccagcaatggctcaatgcacaactattgcccacagcagactaaaattacttcagctttcaaatacattaacactgtgatatcttgtactattttcatcgtgggaatggtggggaatgcaactctgctcaggatcatttaccagaacaaatgtatgaggaatggccccaacgcgctgatagccagtcttgcccttggagaccttatctatgtggtcattgatctccctatcaatgtatttaaggtacagagcagttgcctcctggagtcgtgttcagggaattgggattcctttggtaactgccattgaaattgtctccatctggatcctgtcctttatcctggccattcctgaagcgattggcttcgtcatggtaccctttgaatataggggtgaa

SEQ ID NO: 8236 - DNA, 2214 bp, Homo sapiens
aaatgtagaagatgagataacagggctggaaaactaagatgtgacactcaactctctggtgtccgaagcatttgtcaggttttttgtggagttggtaggacattattctttgaacatgactgtcactgagcgtggggagcgtgttttccaaagggaaccattccgtaagtcccacacctcccgaagtgtacgccacttcctggatctcttcatggaaactcagatgtttgcaggattcatccaggaccgagagcttcggaaaagtggagttaaaggtttgtttgagatccgggccatccagtatttggaaacaattcctgagtcggagcccagtgggatgaatagaattttgcggagtcttggaagcaaaatgaaatttctgcaaaagaaatgaaatctctgattgtctccatcctgaatatacaacagaaagtgccaaagaaaatatttttctaagggtcaggatcccatgaagtattctacaaaattcttgaaattttaaaaggttaaagagcgagtcaggctgttagaggaggattctcctgttgctgctgtagtaatcactggagaattgttgggaatggtctggcaccatgccatctttactctgtctccattttttttttatagcagccttttctatgtgattcttgggctcattctctgttttgtgctttgtctgtgaaagtagttgtgtttcacaaggaaaagccttgttgttgttacatttaaaaaatagctcaaagatgagaataatgagagaaatgctgagtttaaggtagtagagagacatgatggaaatggagaacactagccttatacacataattctcatcactgaactatcatggcccctttaaacccatgggctgtttgacctgggctaaggaatagactcatcacatatctccattgttttgccttatattatatctaggggaatctcacttaggaggaagccctacttgtaatattataaggtactgttattaagtaccttataaaattagacatcttgcaactcctcctccaaattatgtggcatttgagtagtttgcttgtgcctcacatgtcaacattaaactttgtggaggctggatgcagtggctcacacctgtaatctccaccactttgggaggctaaggcaggagtttgagggtgggagtttgagactagcctgggcaacatagcaagatcccatctctacaaaaacattttaaaaataagtaaataaatttaaactttgtgaaattatagctaatatgaaaatgtcctttcaagggcatgggagccacctttattttttagtgtccaccatgtgccatgcactgtggtatatgtatgcatatcatctcaaccaatccttaaatcaaccttatgagatagatatttgcatctccattttactaataaactgaggctgggtgctatggctcacgtctgtaatcccagcactatgggaactcctgacctcaggtgatccacccaccttggcctcccaaagtgctgggattacaggcatgagtcactgcacccggcctgtgtgtgtgtgtgtgtgtgtgtgtgtgtgttttcaaactcatgggcaaattcaagttcagatggtgcacttttcattgattaatgttatagcaaatgtcagtttgttttcttcagtttctgctgatggttttaactggcacagaaagtatttattcaaccttacaaaactgtgtaagttgtattgtgatacagtttattgacttgtacagtattgtcattacaacccattcaggtatgcatgaatctgaagcagaacaccatttaagactggtgctgtataatataattcctacagatgtgggtccagggaatagaactgagcctgtcttttttttaatgttaagcaggttacccccagtggggcttctactagacatctctccatttggtctcttcttacactccaacccagcaggaacagttaataattggatgtttataaaatgggggtaaaagggtttactgtgatggatcctggctatccctctaggaggagacctttgcttcagcaatggtgtcttcatcctcgcagcctgaagctgcttcatttccttaggtctgttgtgttttctgtaaagtgttaggaattctggatatttttgtaaaagaatcaagatttgtataaaatgttgtttacagatcttttaatgaataaatacataaaccccccac

SEQ ID NO: 8237 - DNA, 571 bp, Homo sapiens
agccacagtggaagaatatgtagggcattgaggtttcctatattaacaaagtatcactttgaacccagctacaacttcaaattctgtctgtgcttttagcatgcctgatatctacttgctcttctgcatctgctacaggtaaaactgagataaattttataatttaacatcttgtgacttgttaaaatggatgtagatccagcaatccctcttctgggtatatacctgcttttgttttaattctggagatttctatcaaaattttcaagcagctcagaaattgtcttattttccatagcaactagtagtataaattgtgttcttttatttccaggaaatgcttccagactgcacacttttacttagaggacagtacatcccctagagttatatccacacctccaacacctatctttccaatttcagatgatgtcggagcaattccaataaagcactttccaaagcatgttgcagatttacatgcaagtagtgggtttactgaagaatttgaggaagtgcagagctgtactgttgacttaggtattacagcagacagctccaaccacccaga

SEQ ID NO: 8238 - DNA, 598 bp, Homo sapiens
gaacccacattgaaccaaaccccagccgtgccagagccagagcagctgatatgggggaagcttggtgcagggaggaggatggatgagatctggtatccgttgattaaaggggacctaggatacggggttgcttatggaaccacagagaacagtcccgtgacattcgcgcacttccctgaggacactgtggagcagaaggcagaaagcgtgggcagaattatgcctcacacggaggcccggatcatgaacatggaggcagggacgctggcaaagctgaacacgcccggggagctgtgcatccgagggtactgcgtcatgctgggctactggggtgagcctcagaagacagaggaagcagtggatcaggacaagtggtattggacaggagatgtcgccacaatgaatgagcagggcttctgcaagatcgtgggccgctctaaggatatgatcatccggggtggtgagaacatctaccccgcagagctcgaggacttctttcacacacacccgaaggtgcaggaagtgcaggtggtgggagtgaaggacgatcggatgggggaagagatttgtgcctgcattcggctgaaggacggggagg

SEQ ID NO: 8239 - DNA, 884 bp, Homo sapiens
agccaagcactgtcaggaatcctgtgaagcagctccagctatgtgtgaagaagaggacagcactgccttggtgtgtgacaatggctctgggctctgtaaggccggctttgctggggacgatgctcccagggctgttttcccatccattgtgggacgtcccagacatcagggggtgatggtgggaatgggacaaaaagacagctacgtgggtgacgaagcacagagcaaaagaggaatcctgaccctgaagtacccgatagaacatggcatcatcaccaactgggacgacatggaaaagatctggcaccactctttctacaatgagcttcgtgttgcccctgaagagcatcccaccctgctcacggaggcacccctgaaccccaaggccaaccgggagaaaatgactcaaattatgtttgagactttcaatgtcccagccatgtatgtggctatccaggcggtgctgtctctctatgcctctggacgcacaactggcatcgtgctggactctggagatggtgtcacccacaatgtccccatctatgagggctatgccttgccccatgccatcatgcgtctggatctggctggccgagatctcactgactacctcatgaagatcctgactgagcgtggctattccttcgttactactggtgaggcctgtgggagataagggggagaggggagcagtgtgttgctcagtaacttccaggaccatcctcactatccaaggagatgatgggatgaagttttgcaaatggcaaggcctggctctaatgcacagagcaaagcacatctttctttgctgtgtgaagttgcaaaatgattacactatttccttgaggagaacagttatagacacccagtgttatgcattagtc

SEQ ID NO: 8240 - DNA, 522 bp, Homo sapiens
tgggtctgtgaacatcgatggcgccaaataaggaacatggttaatttccgcaatgtagtggatggccagccttttacaaactggtatgataatgggagcaaccaagtggcttttgggagaggaaacagaggattcattgttttcaacaatgatgactgctctacctagttttttggtatactttcttcacttctctgtctccttgtgacaaataacatttttaaagcatatggataaataatatgtatcttgtggttaatgatttgcttcaggagacttgagttttagttctgaaacttctcattattggcctttcatctgtgatttttgtcttcctgctggcacatactgtgatgtcatttctggagataaaattaatggcaactgcacaggcattaaaatctacgtttctgatgatggcaaagctcatttttctattagtaactctgctgaagatccatttattgcaattcatgctgaatctaaattgtaaaatttaaaattaaatgcaaatccgcaaag

SEQ ID NO: 8241 - DNA, 559 bp, Homo sapiens
agcaggaagttcagacctaagacgctgcatcctggacattctgccccctgaagatattgcagcctgaacagtgtcaacagcagtgactcccggtccagcggctcccactcgcattcccccagctcacattaccgctaccgcagctccaacctggcccagcaggctcctgtgaggctgtccagcgtgtcctcccatgactcaggattcatatcccaggatgccttccagtccaagtcaccatcccccatgccgccagaggcccccaaccagttgtctaacgggttttctcactatagtttatcaagtgagtcccacgtggggcccacgggtgcaggccttttccctcattgcctgcctgcctcccgcctgctccctcgggtcacctctgtccaccttccagactacgctcattattacaccattgggcccggcatgttcccgtcatctcagatccctagctggaagcgccgcaaagagaagcgagaaccggaccccaacgggggaggacccactaccgccagcggcccacctgcagcagctgaggaggctcagagaccac

SEQ ID NO: 8242 - DNA, 465 bp, Homo sapiens
gtgctgccccgggaattactgcaaaaatggaatatgtgtgtcttctgatcaaaatcatttccgaggagaaattgaggaaaccatcactgaaagctttggtaatgatcatagcaccttggatgggtattccagaagaaccaccttgtcttcaaaaatgtatcacaccaaaggacaagaaggttctgtttgtctccggtcatcagactgtgcctcaggattgtgttgtgctagacacttctggtccaagatctgtaaacctgtcctgaaagaaggtcaagtgtgtaccaagcataggagaaaaggctctcatggactagaaatattccagcgttgttactgtggagaaggtgagtttcatatttcaagttttgtttaacctgaaatctattgattggaatgaggatacggatacagtattttaaagaaaacccacaggaataaaatctaaattttctttgcatttgt

SEQ ID NO: 8243 - DNA, 464 bp, Homo sapiens
tgggccaattctcaaaactatcctgtgtggtttcagaaccgaagagccaagttccgcaggaatgagagagccatgctagccaataaaaacgcttccctcctcaaatcctactcaggagacgtgactgctgtggagcagcccatcgtacctcgtcctgctccgagacccaccgattatctctcctgggggacagcgtctccgtacagatcctcgtccctcccaagatgttgtttacacgaggggcttcataacggattctaacggaagacactgaaaagcgccatggctacttattctgccacatgtgccaacaatagccctgcacagggcatcaacatggccaacagcattgccaacctgagactgaaggccaaggaatatagtttacagaggaaccaggtgccaacagtcaactgaggaaaaaaaataattaaacaggcctaagaagaaatcaaaaaccataa

SEQ ID NO: 8244 - DNA, 543 bp, Homo sapiens
gagaaagtagtcactgctccaactttgggagtcgttctcagtgatgggattttaccttggccttcagttgcacttctcccacattctcatcgaagtgggggaaatagttgcccgcgttctttaaaattttgcccatctgtggagtgaagaaattggtatcttgctgcgagtttattttgcgtttaactactggacgtttgcgttcctttttcgaatgcattaaattaggaaaaaacatgaagatacattccgtggaccaaggagcagagcacatgctgattctctcatcagatggaaaaccatttgagtatgacaactatagcatgaaacatctaaggtttgaaagcattttacaagaaaaaaaaataattcagatcacatgtggagattaccattctcttgcactctcaaaaggtggtgagctttttgcctggggacagaacctgcatgggcagcttggagttggaaggaaatttccctcaaccaccacaccacagattgtggagcacctcgcaggagtacccttggctcagatttctgccg

SEQ ID NO: 8245 - DNA, 2815 bp, Homo sapiens
ggcagttaactgccaccaagtggtggttgtatgccatagctctgtaacatgaacagtgtttccaataaactgtccaccgcaaaacccgttaaaaaatgagtgagctccatgagctgaggagctagcagattgccgggattacaaagacaacgagacaggaccctttccttagcaggatttacaatctctcttttaagagcctgtgccgatggaggtgccaaccgcttatatgatatcaccgaaggagagagagaaagattcctctgacagtatcctccaagacctgacatggacaatgtgtgaaaaagcgctcaacctccaacttgaaactctcctcgaggcccccagccaccagtcatctcatcaggacaccgaaagacacccattactgtggagcttccaagggtcttggcaactcttttatcggaaacgagagctttttgcctgaattcatcaatggagactttgattctattaggcctgaagtcagagaatactatgctactaagggatgtgagctcatttcaactcctgatcaagaccacactgactttactaagtgccttaaaatgctccaaaagaagatagaagaaaaagacttaaagaagaaacagtgaaaggaatactgttcaattccaacatcagctgtgtaaccgaggcatcgtaatacttttatgacaagtttcactacctttttgcctgtgccagtgtacctcaaagggatatggttgatgtgatcgtgacactgggaggccttgctgggcgttttgaccagattatggcatctgtgaataccttgttccaagcgactcacatcactccttttccaattataataatccaagaggaatcgctgatctacctgctccaaccaggaaagcacaggttgcatgtagacactggaatggagggtgattggtgtggccttattcctgttggacagccttgtatgcaggttacaaccacaggcctcaagtggaacctcagaacttgtgactacactaggaccacctggatagccaaggataatcccgtcccaagactaatcagattaatcagacttaatcacatctgtaaagttcctcttgccatcaaatgatgtgcttgcttttggaacattggtcagtacttccaatacctacgacgggtctggtgttgtgactgtggaaactgaccacccactcctctggaccatggccatcaaaagctaacctgttgactggcatccataagtgtgcctctgccttatctcatttctcaacagttcattgctcaacaagaacgattcacctgggtttgcaagaatctaaacctctctaggggaagcccactgggtttaaagatgttagtgtttagataatacaggtaacattataaatgacagatctcaattttatagtagtgggaaagatacatgctaagaaagcaaataagctctattatattcggttggaacctaatgggaatcattccactatacaattcagtactgattattcttcttacattattaatcattccatttatcctagaaaattgtttttaatttgaatcagagaaaactgttgaggttcctcttggagtctagaacatccttaaatgtctaacaacaagggctacctctgagtaccttttagtattagttttctgtatatgatatatattatcttatactgaaaaaaaattcctttcagattggggtgttagaagtgcaccaggtcactctgaccttattactgtctttggtattgtcttaaataaatcaagaatcattgacctaattgttaaatttaaaaataggtagttagcaataggtggaaagagaaatgatgtgaaagataaatgatgattcgtggagccctactcacacattaacccccaaattcaaaagtaagaatgcaaaagtctagagggggtaacagtctgcatcatcatcacaacctaaatggagaaagctgtgcagaggaaacttaagcataaaaattgaattcgtttctgacataccttagactgaaaaactgttggttcatccagaagtgtattcatattaccagaaaatgagtttgtctatggggatacatgaacttcatatactaaggagcctaactccaaagcctgcgttctcatcccagtctgatattcacctaagtttccggacccttttccttagctgtaaaatggaagcggttggactgatggtgtctgaggttctttcccacactgaaattctaaatattgacacttagcagtcatagggctgataatacacacagttactgacttagcctaaacaacctggtgcatcgaaatgtattcacctttcttttgtaaagagaccatcttctatcttctttccacctttctctgttttatgaaaccaactgttgacatacaaaccatgattgaaggagaacctgtccaacatgttttatgtacacaaatccctatgttgctataagaaaagtgaaagtaactgttttcttcttggtgctatgacagtgtgagactcaggttgtctgtagagaatgaaaggagcagtggcccgcgtgattgtggcatttaaggagcagtggcccatgtgactgtggcattttcggcacttttcattactttctgcttgaccggaagttgaggcttagctatgtttccatcttcagtttctgaagactagttatatattccttactagaaatatattcataatatataaaagaaatatatctgtgattttaaaattttgctaccaaagaatgcatgttctgtgtgccctgaaaatgttaccagtgttaataaatggatacttatcaaaaaagaa

SEQ ID NO: 8246 - DNA, 840 bp, Homo sapiens
tcagatctgcctaactgcgttgaacagagacgagagaacagagacttgatgaaatgagcatcagctccattcagcagccctggcatcactaaagggagatatagtggaacttaataaacgtctccagcaaacagagagggaacgggaccttctggaaaagaaattggccaaggcacagtgcgagcagtcccacctcatgagagagcatgaggatgtccaggagcgaacgacacttcgctatgaggaacgcatcacagagctccacagcgtcattgcggagctcaacaagaagatagaccgtctgcaaggcaccaccatcagggaggaagatgagtactcagaactgcgatcagaactcagccagagccaacacgaggtcaacgaggactctcgaagcatggaccaagaccagacctctgtctctatccccgaaaaccagtctaccatggttactgctgacatggacaactgcagtgacctgaactcagaactgcagagggtgctgacagggctggagaatgttgtctgcggcaggaagaagagcagctgcagcctctccgtggccgaggtggacaagcacattgagcagctcaccacagccagcgagcactgtgacctggctattaagacagtcgaggagattgagggggtgcttggccgggacctgtatcccaacctggctgaagagaggtctcggtgggagaaggagctggctgggctgagggaagagaatgagagcctgactgccatgctgtgcagcaaagaggaagaactgaaccggactaaggccaccatgaatgccatccgggaagagcgggaccggctccggaggagggtgag

SEQ ID NO: 8247 - DNA, 799 bp, Homo sapiens
tttcaccaggcccccggcttggggcgccttccttccccatggcgggacacctggcttcggatttcgccttctcgccccctccaggtggtggaggtgatgggccaggggggccggagccgggctgggttgatcctcggacctggctaagcttccaaggccctcctggagggccaggaatcgggccgggggttgggccaggctctgaggtgtgggggattcccccatgccccccgccgtatgagttctgtggggggatggcgtactgtgggccccaggttggagtggggctagtgccccaaggcggcttggagacctctcagcctgagggcgaagcaggagtcggggtggagagcaactccgatggggcctccccggagccctgcaccgtcacccctggtgccgtgaagctggagaaggagaagctggagcaaaacccggaggagtcccaggacatcaaagctctgcagaaagaactcgagcaatttgccaagctcctgaagcagaagaggatcaccctgggatatacacaggccgatgtggggctcaccctgggggttctatttggtgggttcccctctgcagattctgaccgcatctcccctctaaggagtatccctgaacctagtggggaggggcaggggcagactctaccctcacccatgaagaggagtagggagagggagaagatgcttgggctttgagctccctctgggaagaggtggtaagcttggatctcagggtcacaagggccctgcgtgctccctcattttgcttctcttttgactggcctcccccaggg

SEQ ID NO: 8248 - DNA, 483 bp, Homo sapiens
gcgtgccgtgcgccccagggacaggggctggtgcccatcctcgccgcgcgctgtcccccgcacttcctgttccgaggagagacccgcgcgctgaccgtgcttcccttctcccctcgccccctctgtccgtgcaggtccatccacatcgtggcgctggggaacgagggggacacattccaccaggacaaccggccgtcggggcttatccgcacttacctggggagaagccctctggtctccggggacgagagcagcttgttgctgaacgcggccagcacggtcgcgcgtccggtgttcaccgagtatcaggccagtgcgtttgggaatgtcaagctggtggtccacgactgtcccgtctgggacatatttgacagtgattggtacacttctcgaaatctaattgggggcgctgacatcattgtgatcaaatacaacgttaatgacaagttttcattccatgaagtaaaggataattatattcca

SEQ ID NO: 8249 - DNA, 1510 bp, Homo sapiens
atttccagcaggagctgcgagcacagtgctggctcacaacaagatgctcaaggtgtcagccgtactgtgtgtgtgtgcagccgcttggtgcagtcagtctctcgcagctgccgcggcggtggctgcagccggggggcggtcggacggcggtaattttctggatgataaacaatggctcaccacaatctctcagtatgacaaggaagtcggacagtggaacaaattccgagacgatgaaagaagcaggagtagaccataggcagtggaggggtcccatattatccacctgcaagcagtgcccagtggtctatcccagccctgtttgtggttcagatggtcatacctactcttttcagtgcaaactagaatatcaggcatgtgtcttaggaaaacagatctcagtcaaatgtgaaggacattgcccatgtccttcagataagcccaccagtacaagcagaaatgttaagagagcatgcagtgacctggagttcagggaagtggcaaacagattgcgggactggttcaaggcccttcatgaaagtggaagtcaaaacaagaagacaaaaacattgctgaggcctgagagaagcagattcgataccagcatcttgccaatttgcaaggactcacttggctggatgtttaacagacttgatacaaactatgacctgctattggaccagtcagagctcagaagcatttaccttgataagaatgaacagtgtaccaaggcattcttcaattcttgtgacacatacaaggacagtttaatatctaataatgagtggtgctactgcttccagagacagcaagacccaccttgccagactgagctcagcaatattcagaagcggcaaggggtaaagaagctcctaggacagtatatccccctgtgtgatgaagatggttactacaagccaacacaatgtcatggcagtgttggacagtgctggtgtgttgacagatatggaaatgaagtcatgggatccagaataaatggtgttgcagattgtgctatagattttgagatctccggagattttgctagtggcgattttcatgaatggactgatgatgaggatgatgaagacgatattatgaatgatgaagatgaaattgaagatgatgatgaagatgaaggggatgatgatgatggtggtgatgaccatgatgtatacatttgattgatgacagttgaaatcaataaattctacatttctaatatttacaaaaatgatagcctatttaaaattatcttcttccccaataacaaaatgattctaaacctcacatatattttgtataattatttgaaaaattgcagctaaagttatagaactttatgtttaaataagaatcatttgctttgagtttttatattccttacacaaaaagaaaatacatatgcagtctagtcagacaaaataaagttttgaagtgctactataataagtttttcacgagaacaaactttgtaaatcttccataagcaaaatgacagctagtgctt

SEQ ID NO: 8250 - DNA, 1446 bp, Homo sapiens
gccagccccgccagccccgccagccccgcgatggcttgggccgcgctcctcggcctcctggccgcactgttgctgctgctgctactgagccgccgccgcacgcggcgacctggtgagcctcccctggacctgggcagcatcccctggttggggtatgccttggactttggaaaagatgctgccagcttcctcacgaggatgaaggagaagcacggtgacatctttactatactggttgggggcaggtatgtcaccgttctcctggacccacactcctacgacgcggtggtgtgggagcctcgcaccaggctcgacttccatgcctatgccatcttcctcatggagaggatttttgatgtgcagcttccacattacagccccagtgatgaaaaggccaggatgaaactgactcttctccacagagagctccaggcactcacagaagccatgtataccaacctccatgcagtgctgttgggcgatgctacagaagcaggcagtggctggcacgagatgggtctcctcgacttctcctacagcttcctgctcagagccggctacctgactctttacggaattgaggcgctgccacgcacccatgaaagccaggcccaggaccgcgtccactcagctgatgtcttccacacctttcgccagctcgaccggctgctccccaaactggcccgtggctccctgtcagtgggggacaaggaccacatgtgcagtgtcaaaagtcgcctgtggaagctgctatccccagccaggctggccaggcgggcccaccggagcaaatggctggagagttacctgctgcacctggaggagatgggtgtgtcagaggagatgcaggcacgggccctggctgctgtccgcggagagctcgagagtatcctttggcaagcggagcagcctgtctcgcagacgaccactctcccacagaaggttctagacagcacacctgtgcttgatagcgtgctgagtgagagcctcaggcttacagctgcccccttcatcacccgcgaggttgtggtggacctggccatgcccatggcagacgggcgagaattcaacctgcgacgtggtgaccgcctcctcctcttccccttcctgagcccccagagagacccagaaatctacacagacccagaggtatttaaatacaaccgattcctgaaccctgacggatcagagaagaaagacttttacaaggatgggaaacggctgaagaattacaacatgccctggggggcggggcacaatcactgcctggggaggagttatgcggtcaacagcatcaaacaatttgtgttccttgtgctggtgcacttggacttggagctgatcaacgcagatgtggagatccctgagtttgacctcagcaggtacggcttcggtctgatgcagccggaacacgacgtgcccgtccgctaccgcatccgcccatga

SEQ ID NO: 8251 - DNA, 3236 bp, Homo sapiens
aatacattaaatattaggtgcctatgggatgtgatgtctaattattagttagaaatccaaatttggaacttagatgaattagggataggaaatgtttgtgtggtagatcagtatgtaaactatagtagataacttaactcagggagatcatgtagagtaaaaagaggactaaagtgaaagttcaaggaaaacctaacacttagagggagggaagatgaggcaagacaagtaaactcaaaaatgaaagtgggttcaaatttcgactctgccaccgaactagatgaggaccaaggccaagttcctttacctcctatacctcagtgtcctcatccaaaaaatggaggtgagcataacagttatttcataccattgttatacaaacttagaaggataaaatctataaaacatttaaagtctggcaaatggtaagaatttaattaatggtcactatctttttgttttagtgtgagcacaggagcttgaggaaataagtaaataaatgccaactttaccccaaaatgttcttttagaaagtagtttaatatgttagtccacataattataaaaacaagcttttcttctgccagctgacttagaggaataccatgttttactctttgttttaagttatcagaaaagaatgtagcatgtgctttgaagcattgtgtgtataataatgagatctttcaagtagaaagtcacttaactgtgctttcttttgttatgtcattagatatgaaatccgagatgatcataccttgaaaattaggaaggtgacagctggtgacatgggttcatacacttgtgttgcagaaaatatggtgggcaaagctgaagcatctgctactctgactgttcaagttgggtctgaacctccacattttgttgtgaaaccccgtgaccaggttgttgctttgggacggactgtaacttttcagtgtgaagcaaccggaaatcctcaaccagctattttctggaggagagaagggagtcagaatctacttttctcatatcaaccaccacagtcatccagccgattttcagtctcccagactggcgacctcacaattactaatgtccagcgatctgatgttggttattacatctgccagactttaaatgttgctggaagcatcatcacaaaggcatatttggaagttacagatgtgattgcagatcggcctcccccagttattcgacaaggtcctgtgaatcagactgtagccgtggatggcactttcgtcctcagctgtgtggccacaggcagtccagtgcccaccattctgtggagaaaggatggagtcctcgtttcaacccaagactctcgaatcaaacagttggagaatggagtactgcagatccgatatgctaagctgggtgatactggtcggtacacctgcattgcatcaacccccagtggtgaagcaacatggagtgcttacattgaagttcaagaatttggagttccagttcagcctccaagacctactgacccaaatttaatccctagtgccccatcaaaacctgaagtgacagatgtcagcagaaatacagtcacattatcgtggcaaccaaatttgaattcaggagcaactccaacatcttatattatagaagccttcagccatgcatctggtagcagctggcagaccgtagcagagaatgtgaaaacagaaacatctgccattaaaggactcaaacctaatgcaatttaccttttccttgtgagggcagctaatgcatatggaattagtgatccaagccaaatatcagatccagtgaaaacacaagatgtcctaccaacaagtcagggggtggaccacaagcaggtccagagagagctgggaaatgctgttctgcacctccacaaccccaccgtcctttcttcctcttccatcgaagtgcactggacagtagatcaacagtctcagtatatacaaggatataaaattctctatcggccatctggagccaaccacggagaatcagactggttagtttttgaagtgaggacgccagccaaaaacagtgtggtaatccctgatctcagaaagggagtcaactatgaaattaaggctcgccctttttttaatgaatttcaaggagcagatagtgaaatcaagtttgccaaaaccctggaagaaggcaagtatgatgaagcgtttgatttccatgcattgcagtatatttgttagaattttattagcttaatttaaattgttataatgttaatagtggcattaattactaactttcttgatattgaacatacattttgctaacagtatttgtttatttagaaaactagaaaagcaaaatgctataatagttgacttgcttcaatagtggcctacctcaaatgtgtaaatgtgaacattatattacttaatggcatatagaaatttaattattcagaactaaaattcacatttaaaaatgaaattgttttccgtttggtttattttccattcagcattttctatttgtttattttgatccatgatttgaataatgtgttgatttgcccaggacttcgtgggattagcattttcttcctaaatctcatctcttttaaaacacctcagttctagacaaatcactatagctgaccaccctattcctagaaattaaacaatatttacataaaggtaaaagattacattaactaacaacaggatttttcccaacatgtctttgtcactttggctgtataagtaattatcatgaatgattaatattcattttcatacttttgaacatttcgggggagaacatgagactagagttacacggtagaagaaataggaattgtcctgggatgtttggtggaaacaaggtatttaactttggttatggaaaattcaccgtggcagtgaattagcattgagtgaggaacaacttaggtagtttgggactattcagacttggatgagatacatctttaaaacatatgcagctgggcacagtggctcacgcctgtaaccccagcactttaggaggctgaggcgggcggatcacctgaagtcacgagttcgagaccagcctggccaaggcggtgaaaccccatctctattaaaaatacaaaaattagtggggcatggtggtgggtgcctgtaatcccagctactcagggggctgaggcaggagaatcgcttgaacccgggagggggaggttgcagtgagccgagatcatgtcacagcactacagcctagatgacagagcgagcctccgtctc

SEQ ID NO: 8252 - DNA, 567 bp, Homo sapiens
agagaggtagcgaggctggaagcgccgctggaggagctacgcgcgcttcactccgtgctgcaggcagtgccgctcaacgagcttcgccagcaagcggcggagctgcgcctcggcccgctcttctccctgcttaacgagaaccatagggaaaagactactttgtgtgtatccattctggagagattgctccaagctatggaaccggttcacgtggcccggaacctcagggttgacctgcagaggggactaattcaccctgatgattctgtaaaaatcctcactctttcccagattggaagaattgttgaaaattctgatgctgttactgagattctaaataatgctgaattactaaaacaaattgtttattgcattggtggagagaatctatctgtagcaaaagcggtgagtctactagaatcattgacttaaatgtgcagagacatcggtgtcccaaaagataaagaaaggccttctgaattgagaggtgaaggtttagaatggatgatttgcgtaatggaatttacaacttcatatggattgtgtaaaataaatggttgtcaagta

SEQ ID NO: 8253 - DNA, 2855 bp, Homo sapiens
ccgttttcttcggttccctgctgtccagagttaaaagtgatgctgagaaagagcttgagttagattgaagtagaatcagtgatagaaaataacagccgaaaacaaacaaaaaggggacatagtgacaatttctcctgggttattttggctggaaccaacttccattatccagaagctgataaaaaagctttgggaaacatgaacaaaacattgatgaaatgttggaaaccagttgaaacacagtaaaaccaactgggtaaaataggaccacttctcttcatctacactgggatttgtcaagaagtgaactatgacaatacatcaatttttgctactgtttctattctgggtatgcctgccacatttctgctctccagaaataatgttcagaaggacgcctgtgccacagcaaagaattttaagttcacgtgtaccaaggagtgatggcaaaattctccatcgtcaaaaacgtggttggatgtggaatcaatttttcttacttgaagaatatacaggatctgattatcagtacgtaggcaagctacattcagaccaagataaaggagatggatcactcaaatatatcttatctggagatggagctggtactctttttattattgatgaaaaaacaggtgatattcatgccacaaggcgaattgatagggaggaaaaggccttttatactctacgcgcacaagctattaacagaagaactctgaggccagtagagccagagtcagagtttgtgatcaaaattcatgatatcaatgacaatgagccaacgttcccagaagaaatctatacagctagtgttcccgaaatgtctgttgtaggtacttctgtggtgcaagtcacagctacagatgccgatgacccttcatatgggaacagcgccagagtcatttacagcatacttcaagggcagccctatttctctgtggagcctgaaacaggtatcatcaggactgctttaccgaacatgaacagagaaaacagagagcaataccaagtggtcatccaggccaaagacatgggcggccagatgggaggcttatcggggacaaccactgtgaacatcacgctgacagatgtcaatgacaacccaccacgtttcccccagaacactattcatcttcgagttcttgaatcctccccagttggcacagccattggaagtgtcaaagcaactgatgctgacactgggaaaaatgctgaagtagaataccgaattattgatggtgacggtactgatatgtttgacatcgtgactgagaaggacacacaggaaggcatcatcactgtgaaaaagccactcgactatgagagccgaagactttatactctgaaagtcgaagcagaaaacacccatgtagatccccgtttttattacctaggaccatttaaagatactaccatagtgaaaatctctatagaagatgtggatgaacctcctgtttttagtaggtcctcctatctgtttgaagttcatgaagatattgaagtgggcacaatcattggtactgtaatggcaagggacccagattctatttccagccccattagacaatcccaaagagacaacacgcgtggctgtttttgtgagaattttggatgttaatgacaatgccccacagtttgctgtgttctatgacacttttgtatgtgaaaatgccagaccagggcagctaatacagactataagtgcagtagacaaagatgaccctttaggtggacagaaattttttttcagtttagctgctgtcaatccaaacttcacagtacaggataatgaagataatactgccagaatcttaaccagaaaaaatggattcaatagacatgaaatcagtacctatctcttgcctgtggtgatatcagacaatgattacccaattcagagcagcacaggcacactgaccattcgagtgtgtgcttgtgacagccaaggcaacatgcaatcctgcagtgctgaagccctgctcctccctgccggcctcagcactggggccttgatcgccatcctcctctgcatcatcattctactggttatagtagtactgtttgcagctctgaaaagacagcgaaaaaaagagcctctgatcttgtcaaaagaagatatcagagacaacattgtgagctataacgatgagggtggtggagaggaggacacccaggcctttgatatcggcaccctgaggaatcctgcagccattgaggaaaaaaagctccggcgagatattattccagaaacgttatttattcctcggaggactcctacagctccagataacacggacgtccgggatttcattaatgaaaggctaaaagagcatgatcttgaccccaccgcacccccctacgactcacttgcaacctatgcctatgaaggaaatgattccattgctgaatctctgagttcattagaatcaggtactactgaaggagaccaaaactacgattacctccgagaatggggccctcggtttaataagctagcagaaatgtatggtggtggggaaagtgacaaagactcttaacgtaggatatatgttctgttcaaacaagagaaagtaactctacccatgctgtctccacttcacaatatttgatattcaggagcattttcctgccagtcagcacaattttttttctcatttacttcttaatttgttcattaattacattaattctttcctgtaggatgtctcatggaatatatatgacattttatttaatcacttccaagagccaaagctatggaaatacagtgttgtccatcttagtaaataaaagataatttcagaaacatgaacaggatagttctcccttaagcaacctcacaaacaagccgc

SEQ ID NO: 8254 - DNA, 3106 bp, Homo sapiens
gtcccgccatggctctgaggcgcgccctgcccgcgctgcgcccctgcattccccgcttcgtcccgctgtccacggcgccggcctcccgcgagcagcccgcagcgggcccagcggccgtgccaggaggtgggtcggccacggcagtgcggccgccggtgcccgccgtggacttcggcaacgcgcaggaggcgtaccgcagccggcgaacctgggagctggcgcggagcctgctggtgctgcgcttgtgcgcctggcccgcgctgctggcgcgccacgagcagctgctgtatgtttccaggaaacttctaggacagaggctattcaacaagctcatgaagatgaccttctatgggcattttgtagccggggaggaccaggagtccatccagcccctgcttcggcactacagggccttcggtgtcagcgccatcctggactatggagtggaggaggacctgagccccgaggaggcagagcacaaggagatggagtcctgcacctcagctgcggagagggatggcagtggcacgaataagcgggacaagcaataccaggcccactgggccttcggggaccgcaggaatggtgtcatcagtgcccgcacctacttctacgccaatgaggccaagtgcgacagccacatggagacattcttgcgctgcatcgaagcctcaggtagagtcagcgatgacggcttcatagccattaagctcacagcactggggagaccccagtttctgctgcagttctcagaggtgctggccaagtggaggtgcttctttcaccaaatggctgtggagcaagggcaggcgggcctggctgccatggacaccaagctggaggtggcggtgctgcaggaaagtgtcgcaaagttgggcatcgcatccagggctgagattgaggactggttcacggcagagaccctgggagtgtctgggtgagagcagcccccaggctgagaggacacgagcatcagccatggttccagccaagccccagtgacgtctcccagtcctggctgccctgcctgagagggtgggccctgggatgacagtgctgaaggaactgcttttcacacagcaggacttgatggcttcaggagtccctgaggctggggctgggctgggcaggggagacacagggccagcacagaccccatagagggctctttatagaattatctgggtccagagcaaaggtggcactctcagccctccctggagtccacgccggcaggtgaaggatcagagccccatgccccatccttggagccaggggctgggacccagatcaccaggagcctccagttgaagtggggaggtgactggggtggtgcagtagtgagccatcccctcacacactgccagccttgcccactgtgtcctccctggccgcccggagctgtgtccgcctcctgcctggctgcctgtgctcggcccctccacaagcccaaaacagcctagggtactcagtgttttcagagccgcctagatgcaggactgtttgtgttttggttttaaatttatttaattaatttattttttatagagaccaggtctcaccatgttgcccaggctggtttcaaacccctgggctcaagtgacctgcccgccgcagcccccaaagtgctgggattataagtttgagcccccgcatgccactggttttaaatttttaaacagaaaacaatatttatatttcctctgtcttttaaaactgaacaccgaggtgggttttgtggtgggtggtgaacggacaggtttgggcctcgatcccccacccgaccctagcacccacaggtgggggtgccccctctgctgatgcgcctcctccctcagcaccatggacctgctggactggagcagcctcatcgacagcaggaccaagctgtccaagcacttggtagtccccaacgcacagacaggacagctggagcccctgctgtcccggttcactgaggaggaggagctacagatgaccaggatgctacagcggatggatgtcctggccaagaaagccacagagatgggcgtgcggctgatggtggatgccgagcagacctacttccagccggccatcagccgcctgacgctggagatgcagcggaagttcaatgtggagaagccgctcatcttcaacacataccagtgctacctcaaggatgcctatgacaatgtgaccctggacgtggagctggctcgccgtgagggctggtgttttggggccaagctggtgcggggcgcatacctggcccaggagcgagcccgtgcggcagagatcggctatgaggaccccatcaaccccacgtacgaggccaccaacgccatgtaccacaggtgcctggactacgtgttggaggagctgaagcacaacgccaaggccaaggtgatggtggcctcccacaatgaggacacagtgcgctttgcactgcgcaggatggaggagctgggcctgcatcctgctgaccaccgggtgtactttggacagctgctaggcatgtgtgaccagatcagcttcccgctgggccaggccggctaccccgtgtacaagtacgtgccctatggccccgtgatggaggtgctgccctacttgtcccgccgtgccctggagaacagcagcctcatgaagggcacccatcgggagcggcagctgctgtggctggagctcttgaggcggctccgaactggcaacctcttccatcgccctgcctagcacccgccagcacacccttagcctccagcaccccccgcccccgcccaggccatcaccacagctgcagccaaccccatcctcacacagattcaccttttttcaccccacacttgcagagctgctggaggtgaggtcaggtgcctcccagccctgcccagagtatgggcactcaggtgtgggccgaacctgatacctgcctgggacagccactggaaacttttgggaactctcctcgaatgtgtgggcccaaggcccccacctctgtgacccccatgtccttggacctagaggattgtccaccttctgccaaggccagcccacacagcccgagccccttggggagcagtggccgggctggggaggcctgcctggtcaataaaccactgttcctgca

SEQ ID NO: 8255 - DNA, 847 bp, Homo sapiens
atctgggttttcaatcacggctccgccatcttgggtcatcgtacggaaggagagacaaaactgcagtacaggtttttgagagctgtcaaatctctgctatatcagtactggctaaattaggtgttaaatgattgagcttcaagatgggcaaatcatgacttcggactacattcctccttgcctggcggctgggaaattccgtccgcgctgctgctaagacttcagatgaaagacgctccggggactccggcatttgtctggccttcccttttactgctggctgggaaggaggagcatcagaccacagatcctggaaggcacttctctccctgactgctgctcacactgccgtgagaacctgcttatatccaggaccaaggaggcaatgccaggaagctggtgaagggtttcctctcctccaccatggttgacagcactgagtatgaagtggcctcccagcctgaggtggaaacctcccctttgggtgatggggccagcccagggccggagcaggtgaagctgaagaaggagatctcactgcttaacggcgtgtgcctgattgtggggaacatgatcggctcgggcatctttgtttcccccaagggtgtgctcatatacagtgcctcctttggtctctctctggtcatctgggctgtcgggggcctcttctccgtctttggggccctttgttatgcggaactgggcaccaccattaagaaatctggggccagctatgcctatatcctggaggcctttggaggattccttgctttcatcagactctggacctccctgctcatcattgagcccaccagccaggccatcattgccatcacctttgccaact

SEQ ID NO: 8256 - DNA, 663 bp, Homo sapiens
agcagtctgttgtggatggttgctgagctgcgcattcggcattgggcttgctttgtttcctgccaggcccagcattttcttctaccagatcggcaggcttgtgggcttcttcctaggtccctcccctgcactctgaataggaaagctggaagctgtgctttagagaagctttaagacgccgaaagaaaccagaagagtgagcgccagttgtataaagcattttgacttgttgatgtcaatttggaacagctgaaaaaatacaggaaaataagataaatacgtacatgttgagggtggggacaaaatgaaggttctgaaccagctgccggcttacagtagccatataagcaacagcagcaatgcaccaacctggtggcatggaatattcacatgggagagccgcatgaggccgcccaccacgcttcctgaaggatgcccgtgtggaagaattttgacgtgccagtgtcctcgttctacagggtgttccattcttccgcaatctcagaaaaatgggactaaaagaaactattttgtaaaataagaagacttccatttttaatgaccaacatgtattaagatggacacctactctacgaaacacgaagttctatggtctcgaagaagcccgtgcctgtttaaaactgatcctaactaaaaacagac

SEQ ID NO: 8257 - DNA, 767 bp, Homo sapiens
tattatgtaattaaaatatctacttcgtaaacactatggtggcagctcatttgctgagaactcatcagctgagaacctgttgactcagttgaggaagccttcctctggtacatcatgttgctgttcttttattataaaactatatatatatatgtgaatttagccctagagaaaatgtgaaataaactggttgaaacaaactgggtttattttgcatttttaatatctactttgtaaggttgattaaatgtctcacaactatgtctttttcagctacaaagaatttttctcatttggctttcttttacataaataggttttacagaaggcgacacatgttgttcagagtgaagtggacaaatatgtagatgatattatgaaggaaaagaatattaaccctgagaaggatgccagttttaaaatatgcatgaagatgtgcttactgcagataactggttataaacagctgtatttggatgtagaaagtgtgaggaaaaggccatatgattctgataacctacagcatgaagagctactcatgaagctttggaatcttctaatgcccacgaagaagttaaacgctagaatctccaagcagtgggctgaaattggttttcagggtgatgatcccaagacagacttcagaggcatgggcatacttgggttaatcaatcttgtgtatttcagtgaaaattacactagtgaagctcatcagattctttcccgttcaaatcatccaaaattagggtattcttatgcaatagttg

SEQ ID NO: 8258 - DNA, 4175 bp, Homo sapiens
gtggagctgccagagtaaagcaaagagaaaggaagcaggcccgttggaagtggttgtgacaaccccagcaatgtggagaagcctggggcttgccctggctctctgtctcctcccatcgggaggaacagagagccaggaccaaagctccttatgtaagcaacccccagcctggagcataagagatcaagatccaatgctaaactccaatggttcagtgactgtggttgctcttcttcaagccagctgatacctgtgcatactgcaggcatctaaattagaagacctgcgagtaaaactgaagaaagaaggatattctaatatttcttatattgttgttaatcatcaaggaatctcttctcgattaaaatacacacatcttaagaataaggtttcagagcatattcctgtttatcaacaagaagaaaaccaaacagatgtctggactcttttaaatggaagcaaagatgacttcctcatatatgataggtttgtacatacacacaaacacatcccaaatttaaaaataactgtttcgtatctatttatttacttcccatcacacataacaatcttctttactgttaaatacaatgccatatttcagtcttcatctcatataatctctctttaacatttagaagtaaaaatcactccttatttttgaaatactctcattttaaaaaatttctatgacactataccctgctggttttcctcatatccttcctcttctttctcctcctccacacttcctcctcttccacctcctgatttttcttcctcccacattcttccttggtttattctgtatgtgtttgtgttattcagggctatacagctttctgcctattcacactctgcacattttacctgagcaatctcatctatcccttgattacaattaaaacacatattaggatgatcccatatatacaaagctgaaacacaatgactgaactccagacgagtctacttcctagacatattcacaaacatcttaaatttaattattcaaatctgtattgattatcttctcctaaaacatgcttatactttcacttttgtgtgatttttatatacaacctattggaggcagatgcagccaaccactagggcatataatcctataattttcagaccctgcactcccagtcatcatccactattttgcaggacatcacaaaaaccatcaggtatggcagccttgctgccatccaccccttcacaaaactgtgtgacaggaatgtattacttactccttccaccacacttcccacctcagtcagtaatcaaattctatgggttcttaatcctgagtatatttatctcatatccgtaattattatctcaagttacttcctggtgaccactcctctagatttttccactaatctcttcacttgatttcttcttgttttgtatttaatagtaagtgatttaaaataatatatttgcttttgattattgccaaatagtttataaactctttattcacatttatttttttgaaatgactttgatttttgaaatgactttttaaaaagtaaggcatgtaaaagagttcaccattccaagaggaaaatacagaaaattgattatccccataaattggcatttcggttaaataaaaagaatgaccaatttgtatatcctgtacaattctaacctaattcttttgcaaatgaataaccatatcttctaattaattttaatctaaataataattttaaggctacatacctgaatttctgaactgtaaagtgagttaatcatttaagcatgatctgcacaaatctacttttgattctatgaacaaataaaacatttatattttgagggaatctcaattcatgcattatgccattataaacattcttagttggtgctttgttttttttgactctccggagtctggtgagccctacttggtcttacactaaatttttaaaaattcacatttcattcttttaggcctttaaacttctaatttttaggataacctaaaagtataaccctttgatagtcacataaaaccatatatactaggtaaaatgtaggcaagaagaacattttaaccccaccatttctgacaatgccacatgttctaatactttcattgtgctgaaattttcattgcattagatacatttttaaataaatgggctactggccaaggcttggagatgtttttgttatgtgatgatttcttgttgtgtcaaatttgtgctgccttagcagttatgacaagctcaagtgattttcagagcctaatttataagttagcggtttgggcactggtagaatttataagtcagtcacaaaattgtattttaccaagtcacagtgatgacatttttgatattatatagtgacatatctataacatttcaaaatactagtattagactaattatagtgttgctatgacctgacctggtgtgcagtacctgggagctcatttgtagctctcatccaaagaaatttagtaaaggcgtgaaagggtcttagttatgaccattaaacctataatacctatcccagactgtatttgagtaggatcgtgatacagaaaatattatagtgacattgtatttgtcctttttcttagatgtggccgtcttgtatatcatcttggtttgcctttttccttcctaactttcccatatgtagaagaagccattaagattgcttactgtgaaaagaaatgtggaaactgctctctcacgactctcaaagatgaagacttttgtaaacgtgtatctttggctactgtggataaaacagttgaaactccatcgcctcattaccatcatgagcatcatcacaatcatggacatcagcaccttggcagcagtgagctttcagagaatcagcaaccaggagcaccaaatgctcctactcatcctgctcctccaggccttcatcaccaccataagcacaagggtcagcataggcagggtcacccagagaaccgagatatgccagcaagtgaagatttacaagatttacaaaagaagctctgtcgaaagagatgtataaatcaattactctgtaaattgcccacagattcagagttggctcctaggagctgatgctgccattgtcgacatctgatatttgaaaaaacagggtctgcaatcacctgacagtgtaaagaaaacctcccatctttatgtagctgacagggacttcgggcagaggagaacataactgaatcttgtcagtgacgtttgcctccagctgcctgacaaataagtcagcagcttatacccacagaagccagtgccagttgacgctgaaagaatcaggcaaaaaagtgagaatgaccttcaaactaaatatttaaaataggacatactccccaatttagtctagacacaatttcatttccagcatttttataaactaccaaattagtgaaccaaaaatagaaattagatttgtgcaaacatggagaaatctactgaattggcttccagattttaaattttatgtcatagaaatattgactcaaaccatattttttatgatggagcaactgaaaggtgattgcagcttttggttaatatgtctttttttttctttttccagtgttctatttgctttaatgagaatagaaacgtaaactatgacctaggggtttctgttggataattagcagtttagaatggaggaagaacaacaaagacatgctttccatttttttctttacttatctctcaaaacaatattactttgtcttttcaatcttctacttttaactaataaaataagtggattttgtattttaagatccagaaatacttaacacgtgaatattttgctaaaaaagcatatataactattttaaatatccatttatcttttgtatatctaagactcatcctgatttttactatcacacatgaataaagcctttgtatctttctttctctaatgttgtatcatactcttctaaaacttgagtggctgtcttaaaagatataaggggaaagataatattgtctgtctctatattgcttagtaagtatttccatagtcaatgatggtttaataggtaaaccaaaccctataaacctgacctcctttatggttaatactattaagcaagaatgcagtacagaattggatacagtacggatttgtccaaataaattcaataaaaaccttaaagc

SEQ ID NO: 8259 - DNA, 731 bp, Homo sapiens
aaaggctggccaggccgcccccagcacgtagagggaatgagtcaggctccggctccacactggcacgtagtgggcggatcgcgccggcgctgagtaggaaggagcttcagccgccagcccggaacgcatcataggttagcttttcaagacacttcctgcatctctgacctgttgcacctctgttatcttggcacctctgttatcttagcagcaagcacctgcctcagctgacccttgagccataacccatagggcttattccaaagggccagtgtgcaaaatatgaatccaagatggcattgtggaaagacgctgtacctcctgtgataaaattactttggtggtgcttttttctcatgtatctcgggaaactaaaaatctgaattgtattcagtggccttttccaaatgaagctcctgaaaagtacatcaagtctaaagtgaaccagctaactcattaagactggaatcatgagcaacaatggagcagacctaacctttggttacatctcctgttttgtagctatccttttgtttggctcaaattttgtgccacttaaaaaatttgatactggtgatggaatgtttctccagtgggttctttgtgctgccatatggttggttgccttggttgtcaatctgatattacattgtccaaagttttggccttttgcaatgcttgggggctgcatttgggcaacagggaacattgctgttgtcccaattatcaaa

SEQ ID NO: 8260 - DNA, 729 bp, Homo sapiens
ttttctcctggacaaggagagagtgcggctgctgagagccgagcccagcaatcccgatcctctgagtcgtgaagaagggaggcagcgagggggttggggttggggcctgaggcaagcccccaggctccgctcttgccagagggacaggagccatggctcagaaaatggactgtggtgcgggcctcctcggcttccaggctgaggcctccgtagaagacagcgccttgcttatgcagaccttgatggaggccatccagatctcagaggctccacctactaaccaggccaccgcagctgctagtccccagagttcacagcccccaactgccaatgagatggctgacattcaggtttcagcagctgccgctaggcctaagtcagcctttaaagtccagaatgccaccacaaaaggcccaaatggtgtctatgatttctctcaggctcataatgccaaggatgtgcccaacacgcagcccaaggcagcctttaagtcccaaaatgctacctctgggaggcactacgcaagatgggactgcgtcctggggtgagacatcccctccttggagatctaaggaaacttctcacctatgagtttgtaaagcagaaatacctggactacagacgagtgcccaacagcaaccccccggagtatgagttcctctggggcctccgttcctaccatgagactagcaagatgaaagtgctgagattcattgcagaggttcagaa

SEQ ID NO: 8261 - DNA, 775 bp, Homo sapiens
gagggccagagttaagacagagcttaagacagagaacctcaacaggaggcctgaaggaaagcacctgggagtcattaggcagcaagggagggaattgcaattctgggcggggctcagctgtgcagagtttagcaaggtctccaggtgcttctgctgagggccagagttaagaaagagcgagaacctcatcaggaggactgaaggaaaggagccaggctgcagccctctgcctgcccttccgtgccatcatctccaggattaatgaaagggccattcaggaaacagcacagggagctacaaatttacgtgttcactggtgattgatcttttcatccagcacaatggacagaagtctaaggaacgtccttgtggtttcctttgggttcctgcttctctttacagcctatggaggtctgcagagcctgcagagcagcctgtacagcgaggagggcctgggtgtcacagcgctcagcaccctctatggaggcatgctcctgtcctccatgttcctcccaccgctcctcatcgagaggctgggctgcaaggggaccatcatcctctccatgtgtggctacgtggccttctccgtgggcaacttcttcgccagctggtacactttgatccccacctccatactgctgggactcggggccgccccgctgtggtctgcacagtgcacatacctcacgatcacgggaaacacacatgcagagaaggcgggaaagcgtggcaaagacatggtgaaccagtattttggcatcttcttcctcatatt

SEQ ID NO: 8262 - DNA, 556 bp, Homo sapiens
agtagaagcctaagaacataacagctagtgaatgatttgctttttcctttcaggtgtcctagcggctacaccggaaaatattgtgaaatggcgttttcaaaaggcatctctccaggaacaaccgcagtagctgtgctgttgacaatcctcttgatcgtcgtaattggagctctggcaattgcaggattcttccactatagaaggaccggctcccttttgcctgctctgcccaagctgccaagcttaagcagtctcgtcaagccctctgaaaatgggaatggggtgaccttcagatcaggggcagatcttaacatggatattggagtgtctggttttggacctgagactgctattgacaggtcaatggcaatgagtgaagactttgtcatggaaatggggaagcagcccataatatttgaaaacccaatgtactcagccagagacagtgctgtcaaagtggttcagccaatccaggtgactgtatctgaaaatgtggataataagaattatggaagtcccataaacccttctgagatagttccagagacaaacccaa

SEQ ID NO: 8263 - DNA, 3107 bp, Homo sapiens
cgatggagcgcgacggctgcgcggggggcgggagccgcggcggcgagggcgggcgcgctccccgggagggcccggcggggaacggccgcgatcggggccgcagccacgctgccgaggcgcccggggacccgcaggcggccgcgtccttgctggcccctatggacgtgggggaggagccgctggagaaggcggcgcgcgcccgcactgccaaggaccccaacacctataaagtactctcgctggtattgtcagtatgtgtgttaacaacaatacttggttgtatatttgggttgaaaccaagctgtgccaaagaagttaaaagttgcaaaggtcgctgtttcgagagaacatttgggaactgtcgctgtgatgctgcctgtgttgagcttggaaactgctgtttagattaccaggagacgtgcatagaaccagaacatatatggacttgcaacaaattcaggtgtggtgagaaaaggttgaccagaagcctctgtgcctgttcagatgactgcaaggacaagggcgactgctgcatcaactacagttctgtgtgtcaaggtgagaaaagttgggtagaagaaccatgtgagagcattaatgagccacagtgcccagcagggtttgaaacgcctcctaccctcttattttctttggatggattcagggcagaatatttacacacttggggtggacttcttcctgttattagcaaactaaaaaaatgtggaacatatactaaaaacatgagaccggtatatccaacaaaaactttccccaatcactacagcattgtcaccggattgtatccagaatctcatggcataatcgacaataaaatgtatgatcccaaaatgaatgcttccttttcacttaaaagtaaagagaaatttaatcctgagtggtacaaaggagaaccaatttgggtcacagctaagtatcaaggcctcaagtctggcacatttttctggccaggatcagatgtggaaattaacggaattttcccagacatctataaaatgtataatggttcagtaccatttgaagaaaggattttagctgttcttcagtggctacagcttcctaaagatgaaagaagaaccagattcttcaggtcattcatatggaccagtcagcagtgaagtcatcaaagccttgcagagggttgatggtatggttggtatgctgatggatggtctgaaagagctgaacttgcacagatgcctgaacctcatccttatttcagatcatggcatggaacaaggcagttgtaagaaatacatatatctgaataaatatttgggggatgttaaaaatattaaagttatctatggacctgcagctcgattgagaccctctgatgtcccagataaatactattcatttaactatgaaggcattgcccgaaatctttcttgccgggaaccaaaccagcacttcaaaccttacctgaaacatttcttacctaagcgtttgcactttgctaagagtgatagaattgagcccttgacattctatttggaccctcagtggcaacttgcattgaatccctcagaaaggaaatattgtggaagtggatttcatggctctgacaatgtattttcaaatatgcaagccctctttgttggctatggacctggattcaagcatggcattgaggctgacacctttgaaaacattgaagtctataacttaatgtgtgatttactgaatttgacaccggctcctaataacggaactcatggaagtcttaaccaccttctaaagaatcctgtttatacgccaaagcatcccaaagaagtgcaccccctggtacagtgccccttcacaagaaaccccagagataaccttggctgctcatgtaacccttcgattttgccgattgaggattttcaaacacagttcaatctgactgtggcagaagagaagattattaagcatgaaactttaccctatggaagacctagagttctccagaaggaaaacaccatctgtcttctttcccagcaccagtttatgagtggatacagccaagacatcttaatgcccctttggacatcctataccgtggacagaaatgacagtttctctacggaagacttctccaactgtctgtaccaggactttagaattcctcttagtcctgtccataaatgttcattttataaaaataacaccaaagtgagttacgggttcctctccccaccacaactaaataaaaattcaagtggaatatattctgaagctttgcttactacaaatatagtgccaatgtaccagagttttcaagttatatggcgctactttcatgacaccctactgcgaaagtatgctgaagaaagaaatggtgtcaatgtcgtcagtggtcctgtgtttgactttgattatgatggacgttgtgattccttagagaatctgaggcaaaaaagaagagtcatccgtaaccaagaaattttgattccaactcacttctttattgtgctaacaagctgtaaagatacatctcagacgcctttgcactgtgaaaacctagacaccttagctttcattttgcctcacaggactgataacagcgagagctgtgtgcatgggaagcatgactcctcatgggttgaagaattgttaatgttacacagagcacggatcacagatgttgagcacatcactggactcagcttctatcaacaaagaaaagagccagtttcagacattttaaagttgaaaacacatttgccaacctttagccaagaagactgatatgttttttatccccaaacaccatgaatctttttgagagaaccttatattttatatagtcctctagctacactattgcattgttcagaaactgtcgaccagagttagaacggagccctcggtgatgcggacatctcagggaaacttgcgtactcagcacagcagtggagagtgttcctgttgaatcttgcacatatttgaatgtgtaagcattgtatacattgatcaagttcgggggaataaagacagaccacacctaaaactgcctttctgcttctcttaaaggagaagtagctgtgaacattgtctggataccagatatttgaatctttcttactattggtaataaacct

SEQ ID NO: 8264 - DNA, 762 bp, Homo sapiens
gaacaccacccagtgtggagcagcccagccaagcactgtcaggaatcctgtgaagcagctccagctatgtgtgaagaagaggacagcactgccttggtgtgtgacaatggctctgggctctgtaaggccggctttgctggggacgatgctcccagggctgttttcccatccattgtgggacgtcccagacatcagggggtgatggtgggaatgggacaaaaagacagctacgtgggtgacgaagcacagagcaaaagaggaatcctgaccctgaagtacccgatagaacatggcatcatcaccaactgggacgacatggaaaaggtatgggaggtttgctgcagcttgggccctcaggatgcataatccctgtgttctctgatacagaacaccacactactgctggggaaataactggctcacattgctcaactgtacttttacttgttaatgttcattctgggttattacccattgaaaaaaaaatccttgtagccataaaaaatgatgagttcatgtcctttgtagggacatggatgaagctggaaaccatcatcctcagcaaactgtcgcaaggacaaaaaaccaaacaccgcatgttctcactcataggtgggaattgaacaacgagaacacatggacacaggaaggggaacatcacacaccggggactgttgtggggtggggggagggggaggaatagcattaggagatatacctaatgtaaatgacgagttaatgggtgcagcacaccaacatggc

SEQ ID NO: 8265 - DNA, 915 bp, Homo sapiens
atgcctcgccaggccacgtcgcggttggtggtcggagagggcgaggggtcccagggggcttcggggcctgcagccaccatgctccgctccctgctgcttcactccttgaggctctgcgcccagaccgcctcgtgcctcgtgctcttcccgcgcttcctcggcacggccttcatgctctggcttctcgatttcttgtgtatccgcaagcatttcctgggccgccgccgccgggggcagcccgagcccgaagtggagctcaacagtgaaggcgaggaggtgcctcccgatgacccgcccatctgcgtgtccgacgacaaccgcctgtgcaccctggcgtcgctcaaggcggtgtggcatggccagaagttggatttcttcaagcaggcgcacgagggcggtccggcgcccaactccgaggtggttctgcccgacggcttccagagccagcacatcctcgactacgcgcaagggaaccgcccgctggttctcaatttcggcagctgcacctgaccaccgttcatggcgcgcatgagcgccttccagcgcctggtcactaagtaccagcgcgacgtcgacttcctcatcatctacatcgaggaagcgcacccctccgacggctgggtcaccacggactctccctacatcatcccacagcaccggagcctggaggaccgggtcagcgcagcgagggtactgcagcaaggtgcacccggctgcgctctggtcctcgacaccatggccaactccagcagctcggcctatggcgcctacttcgagcgtctctatgtcatccagagtggcactattatgtaccagggcggccgtggccccgacggctaccaggtctctgagctgcgcacttggttggaacgctatgatgagcaactgcacggcgctcggccccggagggtgtaa

SEQ ID NO: 8266 - DNA, 696 bp, Homo sapiens; identical to SEQ ID NO: 7155

SEQ ID NO: 8267 - DNA, 2809 bp, Homo sapiens
gaaaccgtttctacatggctggctctaagccagatgatatttcatagtgcaaagagggatagaacctcactggtggccaaatgtgattatatgctataaccctgtgcccctactctgacacccacccccaagcagttaccctctgttggaagcctgcagctttctttgtttgtttctttaattatacagacagtaggatctgcatccttactagcatatagaaaaatcagagaaacaatgcaaccaagagtgctgttttcatttgtttcttctgcatccttttaatggaattttgtaggtctcttgaaagtgatgcagaagaccacaagcctttgaaaaaaggaagtcgaactccttcagacaggactgtgaaaaaagaagatagtgacgacagcctagttgactatggagaaggggttaatggccagttcaatgaggatggctcctttattggacaatacagtggtaagaaagagaaagagccggctgaaggaaacgaaagctcagaggcaccttctcctgtcaacgccatgaattcctttgtttaatttttaagctctttgccaatattccatttctctagaatgtttatcctaagcacttgtttgtcagccctctcatactatgaacatatgggtagagagtatattttctgctgtatgttagtattatgagaatagttacagcaaaaacataactcagtcaaatgatatgttaatatgaactggaatgcaaagtgcatactttttcattcaaaatgggtattcttgatttcctcagaactgataaaaaataatgcaacatcaccaacagatcctgttatttcctctgcaggatacagttcaatatgatgcatgaaaaatgctccacatttaaaggacatacccgtgtatgttatgaaaacatggtttgatactttgtttatactaccctcagctgaacccctatatatgaattccgttttcattgtcaagaatgttactgtagtattctctagaacttcaatgtctttgtggacattgttgtgaaattggtgactatgtatagctgtcgttagtctttttgggagactgttaggaacagtttgtacagtatatacttgctaaatgagttcattatgacagtcacattgctgatgcttactgagaactattacctactcttggctcctgttactccgtaggcttcttaatcttccaggcattacagcagcacagtgttctactttttacatcatttctatgttcggttgtttttaggcataaacaatgtgtattgcagtgcatttcggcatttgtgccatactgaaagaatcaaaaacaaatcatccaaattaaatttcaaacattatttcagagaacacagggcaagacacatacagtgccttcagatattaagcattccacaacatcgtgcattctgtatcagctggtccagtccattctgggtcctagattactgtcattgtctaaaagtaacttttaaaaagcagagttcatgaaaactgcaatgctgggaaaagaaggaaacatgaaaataaaaataagacagtttattagaaatagcatttcctcataagcataaaaagaaaatctttgttgccaactgaagcacatgatgattttgtggtcctttatggtttctattacattcagtaagaaagatgtcaacatgctagaaaattaattttaaaactaagttattccaacactaaaagcatacaacagcatgccaacagtaatatattattctccaagactttacctatgtaagtgttcaaaactctgcagcattaaacaacgtgtatgcaaattgttatggatacatttcagaatctaagaaatcaggcaagtgcttaaaaggccaacggtccaagggattacatctgcagtttaaaaagtaaatatatattctatcgtattcataaacaatatctatcaaatgggttacctccaaatatgaaaatctataacaacctatggttgaaggaatgctcagtttcatttgccaataaattggtttctcataacttgcatcaagtttaattttaagtaaagctttttatatgtagatattttgttgaatttgtaaatacacttaaaatgtagatgctatatgcttataggtgttacatacaaataaacatgcaatgtttatgttgtactgtataagaggtaagctaattaatgcagtgaatgggattggaaagcatctacttaaatatctattgggttcccccctccccccaccttttttgctgtgaaactgaaatagtgaacttttctacgtattgacagcagatttttcgatgaaatcttcagagctttgcctatggggcacagtaggcctagtaacctggcatgtttgatatatgtaggtaaagcataatttaaagtaatcccaggtaaagatggccctaaatactttcatgtctctatattcatttttcacagatccacctgtctcttgaaaatataaaaagacaaaacaggtttgccttggcatcagagagcacaaagattaaaagttactttaaatttgccaatattttgggagaacaataaaactacattttttcctcttccatactggtagatgcgaaatttatctgtgcatgaaagggtcacttctgtaatagtgcaacagatttggtattaaaaattaaatgtggttttaaaagttcctctctcttttgtaatttatgttcccaattgagtgtgaatgtccaagtaatggtgtatgtaatggtacaggcaaatgtgactggatttccctcaaaaaagtaactattaaacagtcttgatctctt

SEQ ID NO: 8268 - DNA, 1769 bp, Homo sapiens
tcgctctccccctcgagggacaaacttttcccaaacccgatccgagcccttggaccaaactcgcctgcgccgagagccgtccgcgtagagcgctccgtctccggcgagatgtccgagcgcaaagaaggcagaggcaaagggaagggcaagaagaaggagcgaggctccggcaagaagccggagtccgcggcgggcagccagagcccagccttgcctccccgattgaaagagatgaaaagccaggaatcggctgcaggttccaaactagtccttcggtgtgaaaccagttctgaatactcctctctcagattcaagtggttcaagaatgggaatgaattgaatcgaaaaaacaaaccacaaaatatcaagatacaaaaaaagccagggaagtcagaacttcgcattaacaaagcatcactggctgattctggagagtatatgtgcaaagtgatcagcaaattaggaaatgacagtgcctctgccaatatcaccatcgtggaatcaaacgagatcatcactggtatgccagcctcaactgaaggagcatatgtgtcttcagagtctcccattagaatatcagtatccacagaaggagcaaatacttcttcatctacatctacatccaccactgggacaagccatcttgtaaaatgtgcggagaaggagaaaactttctgtgtgaatggaggggagtgcttcatggtgaaagacctttcaaacccctcgagatacttgtgcaagtgccaacctggattcactggagcaagatgtactgagaatgtgcccatgaaagtccaaaaccaagaaaaggcggaggagctgtaccagaagagagtgctgaccataaccggcatctgcatcgccctccttgtggtcggcatcatgtgtgtggtggcctactgcaaaaccaagaaacagcggaaaaagctgcatgaccgtcttcggcagagccttcggtctgaacgaaacaatatgatgaacattgccaatgggcctcaccatcctaacccaccccccgagaatgtccagctggtgaatcaatacgtatctaaaaacgtcatctccagtgagcatattgttgagagagaagcagagacatccttttccaccagtcactatacttccacagcccatcactccactactgtcacccagactcctagccacagctggagcaacggacacactgaaagcatcctttccgaaagccactctgtaatcgtgatgtcatccgtagaaaacagtaggcacagcagcccaactgggggcccaagaggacgtcttaatggcacaggaggccctcgtgaatgtaacagcttcctcaggcatgccagagaaacccctgattcctaccgagactctcctcatagtgaaagacataaccttatagctgagctaaggagaaacaaggcacacagatccaaatgcatgcagatccagctatcagcaactcatcttagatcttcttccattccccatttgggcttcattctctaagaccccttggcctttaggaaggtatgtgtcagccatgaccaccccggctcgtatgtcacctgtagatttccacacgccaagctcccccaaatcgcccccttcggaaatgtctccacccgtgtccagcatgacggtgtccatgccttccatggcggtcagccccttcatggaagaagagagacctctacttctcgtgacaccaccaaggctgcgggagaagaagtttgaccatcaccctcagcagttcagctccttccaccacaaccccgcgc

SEQ ID NO: 8269 - DNA, 719 bp, Homo sapiens
gtggttcacgtcttctgtttccttattgaacttctgtctggttgttctatccataactgaaagtcagatagtgaagtcgcctaccattattgtgttgctgtttatttctcccttcagttctaagtttgctccatatttttgggagctctaatgtgaggcaatggtacaaaataaccgcatagagcttctcaatcatcctgtgtgtaaagaatatttactcatgaaatggttggcttatggatttagagctcatatgatgaatttaggatcttactgtcttggtctcatacctatgaccattctcgttgtcaatataaaaccaggaatggctttcaactcaactggcatcatcaatgaaactagtgatcattcagaaatactagataccacgaattcatatctaataaaaacttgtatgattttagtgtttttatcaagtatatttgggtattgcaaagaagcggggcaaattttccaacagaaaaggaattattttatggatataagcaatgttcttgaatggattatctacacgacgggcatcatttttgtgctgcccttgtttgttgaaataccagctcatctgcagtggcaatgtggagcaattgctgtttacttctattggatgaatttcttattgtatcttcaaagatttgaaaattgtggaatttttattgttatgttggaggtaattttgaaaactttgttgaggtctacag

SEQ ID NO: 8270 - DNA, 630 bp, Homo sapiens
atgaactttctgctgtcttgggtgcattggagccttgccttgctgctctacctccaccatgccaagtggtcccaggctgcacccatggcagaaggaggagggcagaatcatcacgaagtggtgaagttcatggatgtctatcagcgcagctactgccatccaatcgagaccctggtggacatcttccaggagtaccctgatgagatcgagtacatcttcaagccatcctgtgtgcccctgatgcgatgcgggggctgctgcaatgacgagggcctggagtgtgtgcccactgaggagtccaacatcaccatgcagattatgcggatcaaacctcaccaaggccagcacataggagagatgagcttcctacagcacaacaaatgtgaatgcagaccaaagaaagatagagcaagacaagaaaaaaaatcagttcgaggaaagggaaaggggcaaaaacgaaagcgcaagaaatcccgtccctgtgggccttgctcagagcggagaaagcatttgtttgtacaagatccgcagacgtgtaaatgttcctgcaaaaacacagactcgcgttgcaaggcgaggcagcttgagttaaacgaacgtacttgcagatgtgacaagccgaggcggtga

SEQ ID NO: 8271 - DNA, 291 bp, Homo sapiens; identical to SEQ ID NO: 6525

SEQ ID NO: 8272 - DNA, 693 bp, Homo sapiens
ggctgacattattatcggacacttatgtatcagacatgaaatgactccagtaaaccctggtgttggccagtgctgcacttcttcatatgccaacaggaggccatgcttcagcagcttggtggtggatgaaacatatgtccctcctgcattctctgatgacaagttcattttccataaggatctgtgccaagctcagggtgtagcgctgcaaacaatgaagcaagagtttctcattaaccttgtgaagcaaaagccacaaataacagaggaacaacttgaggctgtcattgcagatttctcaggcctgttggagaaatgctgccaaggccaggaacaggaagtctgctttgctgaagagggacaaaaactgatttcaaaaactcgtgctgctttgggagtttaaattacttcaggtaacaaaacattcagacaagcctgaatacaatgttgtttctccagaaatatcaatccataatgagatagatcatgaggagtgccattaattctcttaaaaatacatggaattcaaaaaaaagtttattttaaaaacacttgaacaaaattacgcacacaatgttaaattagtggctcaactatgcaaaatcctttttggttatttaaaagacttcaacaaatgctatcagaagactttcctacgtatccaatatttctctgatataaaataatagaacc

SEQ ID NO: 8273 - DNA, 1902 bp, Homo sapiens
cttcaatgttcttaactatgtcatcttcttggactgctgttactgcgcagcacccaagccccagggagacatggaagcaggtgattccttcaacacccagaatgagccagaagacatgatgaaaaaagagaaaaagtctgaagctctgaatatcagaggtgtacttttgcatgtgatgggagatgccctggggtccgtggttgtggtcatcacggccatcatattctatgtgcttcccctgaagagtgaggacccgtgtaactggcagtgttacattgaccccagcctgactgtcctcatggtcatcatcattttgtcatctgccttcccgcttatcaaggagaccgctgccattctgctacagatggtcccaaaaggagtcaacatggaagagctgatctggtaacaaatagttaatggactgacactggtatgcagaccaaggctttgagtggcactgcgtgcatggaaaagagaagagaatcaaggacggagccctggggcactctgacctttggagatctggcagctgggggaggagccaacaaaaaagctggaggaagagcagccatgagtccagcctgaggaatgcctgctcaactggtttgatcattttgactgaaacaagcggtcatttcatgtcctatgggatgcttgctgaggacattaaacacagaaacaagtagaacatgaattcagagtgaaggagatgttaaagggatggagaaatggagaaagagagttgaaataactctcctattaccatcaagcaaatcaaacacagaatgggaccagcatgccacattccctctgtgaagccttggagtgcaactgcattagctcaatggtgcatttcacaacgtcacaacttcatctcagatcatcacaaattgtccatattgaaacctgggtgcaatgagaataatcacttaaattttctctggtcccacttttctgctttacagtggtagttgagaatgtcatacccctaaggacatggggaagatgtgtccttgactgattgatccctgtgacacagtctgacactttgcttttgttcagcaattctcaaagcactggattgcaatgatgccctgttgacagcactgttcaaaagtcgacctgttgttgctggaacctccaagaatacagtgtttgatctcagccaggatcctgtcttggaagaggagagggaatcccaaaaactacttgtgaagaagatcccattgttcaatcaaatcctcgtcactgtagcaatccatgcatgccattgcagttggcattctgacacgtgtacacagtgttttcatctcttccctggagttgcagccaaagcctgagattcctttcgacacgaccctgaaaaaactctgggtttgtgctcccctctgctctgcaataacataccagctctgtgatgtggccaatgtttacctagttggtgggaggactttttaatatcaaaaggaaaacatttcttctgcattccacatagaatctgccaaggacattcccaaagatctacttacttattagagaaaccaagagagtcccagcagcacagagggatcgagaagactgagaacagaactggagaacaaaagtgaagtggtggcaaagtgctggaccagatgttagaagtctccaatttgctctcgacaacaacaatccacaagtaaccctgagaaaagtcatctctgtttccccactggtaaataatggtaagaaaaatagtgcctagtggggcttacgtagaggactgggaagctgaactgtgaaaaatgattccaaggtttctggtcaccatggctactactcttttgtacccagttctttgctcctcaaggagccttgttttctatacttgtgaatatttcaaccaactaataaagatttaatggc

SEQ ID NO: 8274 - DNA, 544 bp, Homo sapiens
actcactcacacacaatgtgccatcctgacaaggcttttacttctgataagctccaatgtgtgtttaatgaatacaaagccgcggtctgggtgccgcctcggccgcggccgctctcccgcgctcctttgccagaagaaaagattgatctctgggctggtgaacataatctctgtcccagtcagaaaaggagagaggaaattagcagagcgattggtggagaatgatatctgtcaaaagaaacacttggagagcactgagtttagtaataggtgactgccggaaaaaagggaactttgaatattgtcaaggcgcacgcgcccagcaccctgcctccggcgatgccgccccagcccctctgatggccctcctctctgctgccactcattccagaacaggaggcatgagcccggaacgcgcttgcttttaggagacagccactttctgtgtggtacgctggattcaaggatgcctgatcgtactgagaagcactccacaatgccagactcacctgtggatgtgaagacgcaatctaggctgactcct

SEQ ID NO: 8275 - DNA, 560 bp, Homo sapiens
ccgaactcctggatttcaggacaagcgccccttctctgattcctgtaaacaagcagagagcacatcacaactctgtgaagaagattctttgggctataaagatgaagagtctacttcttctggtgctgatttcaatctgctgggctgatcatctttcagacaactatactctggatcatgacagagctattcacatccaagcagaaaatggcccccatctacttgtggaagcagagcaagccaaggtgttttcacacagaggtggcaatgttacactgccatgtaaattttatcgagaccctacagcatttggctcaggaatccataaaatccgaattaagtggaccaagctaacttcggattacctcaaggaagtggatgtttttgtttccatgggataccacaaaaaaacctatggaggctaccagggtagagtgtttctgaagggaggcagtgatagtgatgcttctctggtcatcacagacctcactctggaagattatgggagatataagtgtgaggtgattgaaggattagaagatgatactgttgtggtagca

SEQ ID NO: 8276 - DNA, 666 bp, Homo sapiens
gctttatccgggtgactgcatggcactgaatttctgcattgaaagttctaactgactaaactgacattctgcactgcagcaagtgactgtgtcaggaaaagcttaatttataagcaagtttcctggagtgaaaacggcgttggagataatgatatctcagggcaatttcttctgaaatacattcattctgccttgtatccagagaaaataaaagggaacatgaaaagatagttaatttctcattttacctttttaataatctatttggagggttgtgcattgccaaggcccctttagatggaatataatacagcagaagccttttcatcaaaaggattaatgcctgcatcatcatttctgcaataaaacaagaagctaagtggtggaggccacagacacctcaaacctggattccacaattctacgttaagtgttggagtttttattactctgctgtaggaaagcctttgccaatgcttacaaggaactgtttatccctgcttctctgggttctgtttgatggaggtctcctaacaccactacaaccacagccacagcagactttagccacagagccaagagaaaatgttatccatctgccaggacaacggtcacatttccaacgtgttaaacgtggctgggtatggaatcaattttttgtgctgg

SEQ ID NO: 8277 - DNA, 280 bp, Homo sapiens
cctgggaagagccaacagacggaagcccaagcctccagcacctgaagatcttgcagtaatttgtttcacaagtggaactacaggcaaccccaaaggagcaatggtcactcaccgaaacatagtgagcgattgttcagcttttgtgaaagcaacagagtgtgtaatgctgtgtcatggagctaaaatcggatttttccaaggagatatcaggctgctcatggatgacctcaaggtgcttcaacccactgtcttccccgtggttccaagactgctgaaccgg

SEQ ID NO: 8278 - DNA, 719 bp, Homo sapiens
agcagcaggaggaggcagagcacagcatcgtcgggaccagactcgtctcaggccagttgcagccttctcagccaaacgccgaccaaggaaaactcactaccatgagaattgcagtgatttgcttttgcctcctaggcatcacctgtgccataccagttaaacaggctgattctggaagttctgaggaaaagcagcactaaagatgtacctacccctccacaacagatgaaactgtgccagccaaacaacaaatgggcattgtccccagaagcttggacaaaaaggcacacagagttcaattccagttgaacagaataaaggccaaaatagagctgccttgggggtcactgcaattagactgcttaatgaagacattaaaagaagtattctgtctttacaacaaatacccagatgctgtggccacatggctaaaccctgacccatctcagaagcagaatctcctagccccacagaatgctgtgtcctctgaagaaaccaatgactttaaacaagagacccttccaagtaagtccaacgaaagccatgaccacatggatgatatggatgatgaagatgatgatgaccatgtggacagccaggactccattgactcgaacgactctgatgatgtagatgacactgatgattctcaccagtctgatgagtctcaccattctgatgaatctgatgaactggtcactgattttcccacggacctg

SEQ ID NO: 8279 - DNA, 520 bp, Homo sapiens
cagccgcggccgcagtggaggctagagccggagcggcggcggcggcggcaccccggggagtttaagatggcggcgggggggacagggggcctgcgggaggagcagcgctatgggctgtcgtgcggacggctggggcaggacaacatcaccgtactgcatgtgaagctcaccgagacggcgatccgggcgctcgagacttaccagagccacaagaatttaattccttttcgaccttcaatccagttccaaggactccacgggggaaaagagtgcaaattcggaaagcacctcaagctgtttcagatacagttcctgagaggaaaaggtcaacccccatgaaccctgcaaatacaattcgaaagacacatagcagcagcaccatctctcagaggccatacagggacagggtgattcacttactggccctgaaggcctacaagaaaccggagctacttgctagactccagaaagatggtgtcaatcaaaaagacaagaactccctgggagcaattctgcaaca

SEQ ID NO: 8280 - DNA, 4950 bp, Homo sapiens
acgatagtcacacctctcctttgggcctagcagggccagagaaagacggaatcactctacccactcaggttgcccagagagcactttaggttctgactcgcgtggggcgcgaggtaccccgtggggcagctaggtgcctccaagaaaccccgccccagaggacccgcacgagttgctgccatttttcgctgaagcccctgccctggggctggtgttcttctctatgattctaccaatcgtcggcatttttttcctcccttctttctttttaggaaggcgctggggtgtgcggcggcaacggcggcggtgaagggatcctcttgtggtatctcctcgtgggttcctgtcttgaaggatttcttctccgcctcaactttatgttcaagtagcgctttgggggttgggttggttttcatagcccccacccccggccctctccttttaaagggtgtgtggagttcagaggatgggtggagagcgggcttggccggaactgaattggtagaggtaaaaggggaacggaggaccttaagctctggccacttcggcccagcgaacccactttatttttgtccaaggaaaagctgcaggggggaggattctttttaggaagtctactctgccggcccctgatttttgggttggatgcttgagagctttgtttcccttgttccgagagtggcccagctgggtctgaatcgactccctcccctttcgaccccctcctcattttccagcccggagaaataggggagtgggggcccaagaacgagaagacgagaacgcgtcgccctgcgctatgtcagaatggggcgggtgtgaggggaacagctctcttgcgatcagctcaggagtatgagcctcccggaggacggcatgagttctggacacttcaggagtcctcagctagtgacatggtcggtcactgcttctgttcggaacagagatccccctgagatagaatacagaagtaatatgacttctccaacactcctggatgccaaccccatggagaacccagcactgtttaatgacatcaagattgagcccccagaagaacttttggctagtgatttcagcctgccccaagtggaaccagttgacctctcctttcacaagcccaaggctcctctccagcctgctagcatgctacaagctccaatacgtccccccaagccacagtcttctccccagacccttgtggtgtccacgtcaacatctgacatgagcacttcagcaaacattcctactgttctgaccccaggctctgtcctgacctcctctcagagcactggtagccagcagatcttacatgtcattcacactatcccctcagtcagtctgccaaataagatgggtggcctgaagaccatcccagtggtagtgcagtctctgcccatggtgtatactactttgcctgcagatgggggccctgcagccattacagtcccactcattggaggagatggtaaaaatgctggatcaggtaagtaacaatattgcctctttcctggccttcctgaatctattcccttttagagtcatcctatctcctgtctcttttcacttcctccaattattcttgcacactgcttcaagagtaatctttcaaaagtactgttttttatgtctttttaatgcttaagaatgtacaatgagtcttgattagaccatgcttctcaaacaagtacaagtatgcatatctatcagtgacatatcaaacaacttcctggaacttccacattatttgatattaaataatttaagcattttatatttaaaatatgattatcttgtattacaaaatgcaaaatttaaaaacctgttaagataaaccacatgcttcaaaaatagttgaagcttactaaaggcatccaccctcggacttttcaggagaatgtgtttattttatgccattcagaatgctttggtgggaaagttgagaacaatatttctatctcaaacatacttagccagtattagctcctgcctctaccaatactttcccttttctcttccctacaaaagaagtaattgaaatattgtcatcttccctgtgttcttcctcatttggcatctatcactttccattttacttatttatttgcctgtatcacaagagtttgggcattattcacaactgaattgtaaattcctgaaaaataatactctatcttaatttttttatgtatgcctccagagaacttaacacagtgctaggagttgtcttgcaacagataatttgatgaacaaacaaacttgaaaatttgtccaagagagaattcaaatgctataatcttccattttattttatttttaaaataagttcagaattcagaaaggtataaattaagtctctcttccaccactatcccccaaccactagttttcctcccagaggtatatctgttttagtttgtaatcaggaatgatcaaggaaaattatgtggcctctaaagcaggctgataatgttttgcataaatcggaaaggccaaggggtggaaatgactaggaagcagatttcagcttactgtaaaagagtatctacccttgaaatttgatgccctgtactaaatgtaggaggctgaaaaacaacatactactaagcatcaagttgctgagactctgcactggtcttctgaatacaaatattattattgactagtggttaattgtggtaatgataagtgttcataatcttattttgagatgtgatatccattccatatatgaagggagagccaaacaaacaaaccaaaaaaaggaaacaaacaaaaaaggaaataaaattcctcgtgtgacagtttatgctgagataaaggcagtggtaacatcaaaggatggtttgaaggagctttgaatagtccccataatatcatcagtccatcagagccactctaaataaacaggataaattttaaatgtgctcaatgtggttccaagctaagggcattggcccaatggtgtctgtattagttcgttttcatgctgctgataaagacatactcgagactgggaagaaaaagaggtttaattggacttacagttccacatagctggggaggcctcagaatcatggtgggaggcaaaaggcacttcttacatggtggcagcaagagaaaaggaagaaagaatagcggaaagccctgataaacccatcagatctcatgagacttattcactatcatgagaatagcaggggaaaactggccaccatgattcaattaactcctcctgggtccctcccacaacatgtggaaattctgagagatacaattcaagttgagatttgggtgggggcacagccaaaccacatcagtatccaaaatggggggcttactaaaccttagggggcacatataaaacaattggagtgcaagaagaaagtatcaaaatttgtattttcttacccttaaaaattgacaggtaatattgtatgttttaatcatctatagcatgatgttttgaagtacatatgcattgtggaatggttaaatctagctaaataataaatgcattacctcattatcatttttgtggtgagagcacttaatgtccattctctttacaattttaataaataaaatgtatcatcattaactatacttgccttgctatacaatagatctcttgaaatgtattcctcctatctagctataattacgtatcctttgaccaatatctccccatccccctccccactagccaccccagcctctggtaactaccattctactctacttgcatgagattaacttttttagattccacatatgagtgagatcatgcactatttgtccttctgtgcctggcatatttcacttaacataatgtcctccaggttcatctatgctctcacaaatggcaggattttattctttgttataactgaataatattatattgtatatatatatatgtcacatttcatttattcattcatttgttgatagatattttaggttggttccacatcttggctgttgtgaataatgctgcactaaacagggatgcagttatcttttgggcatgtgattttatttcctttggatatatacccagaagggagattgccagatcatacggtagttctaattttaagtttttgaggaacctccatactattttccataaaggctataactagtttacattcccatcaacagtgtgtaagtgttcccttttctccacatactcaccagcacttactgtcttttgtcttttcgataatagtcactctaacttaagtgagatgacatactactttttgtttgttttcttataatgtatacaaaattgtaggataccgatacatgtatatcacatacatgcacaaacatgcacacctcaagatacatgcttaaaactttttagtgaatgatatgcaaagtatagagacaactcttttaaccaaatacttgttccccaccttatcaccacccccaagtttcttctctatagaaattttgaaggtttcactggatctaggagactgttgaccacctgattgagtttttaggaattagaaacatcaggggttgataataaggaatatttgacagcttctcccaacataggtggaaaggaaggttgtatcaagcacctactaggtggtaggtatacgtttcatctcattgacttatttctgtttaggagcacaaaggccaaggtggatgttctcacatctggactaatcctagaatttgattttaggacagccaggagctattcagtgagttcaattcaacacacacacacacacacacacgttgaaactaacttttcagctgaccctgtcctggtagctggagatagaaagatgaatcatacccagaccacatcctagagacactctcatttgataccactcatagtggtatcagaactcttcatactactcttactttaaaggcatttctgttccctgctatgcaaaaaaaaaaaataaa

SEQ ID NO: 8281 - DNA, 388 bp, Homo sapiens
tattaaacagattagtcttttgcctttttaagagacagtttatgccttaggaaagtctgtacatcacgtaatattttttccatttcttgtctctgacctacagtaagcctattgttttgttccacaggtgtattacaacacggatgatgaacgagaaggtggcagtgtccttgttaaacggatgttccggcccatggaagaggagtttggtccagtgccttcaaagcagatgaaagaagaagggacaaagcgagtgctcttgtacgtgaggaaggagactgacgatgtgttcgatgcattgatgttgaagtctcccacagtgaagggcctgatggaagcgatatctgagaaatatgggctgcccgtggagaagatagcaaagctttac

SEQ ID NO: 8282 - DNA, 2103 bp, Homo sapiens
ttttcctccctctcccgctccgtctcacacgcaccctctgtttattttcctgcctccatctgggccctgctgatattgtaatcaccctgatgcacgttggcttctctcctctccctcctgcgctcacacactcactcacacacaatgtgccatcctgacaaggcttttacttctgataagctccaatgtgtgtttaatgaatacaaagccgcggtctgggtgccgcctcggccgcggccgctctcccgcgctcctttgccagaagatcgtactgagaagcactccacaatgccagactcacctgtggatgtgaagacgcaatctaggctgactcctccaacaatgccacctcccccaactactcaaggagctccaagaaccagttcatttacaccgacaacgttaactaatggcacgagccattctcctacagccttgaatggcgccccctcaccacccaatggcttcagcaatgggccttcctcttcttcctcctcctctctggctaatcaacagctgcccccagcctgtggtgccaggcaactcagcaagctgaaaaggttccttactaccctgcagcagtttggcaatgacatttcacccgagataggagaaagagttcgcaccctcgttctgggactagtgaactccactttgacaattgaagaatttcattccaaactgcaagaagctactaacttcccactgagaccttttgtcatcccatttttgaaggccaacttgcccctgctgcagcgtgagctcctccactgcgcaagactggccaaacagaaccctgcccagtacctcgcccagcatgaacagctgcttctggatgccagcaccacctcacctgttgactcctcagagctgcttctcgatgtgaacgaaaacgggaagaggcgaactccagacagaaccaaagaaaatggctttgacagagagcctttgcactcagaacatccaagcaagcgaccatgcactattagcccaggccagcggtacagtccaaataacggcttatcctaccagcccaatggcctgcctcaccctaccccacctccacctcagcattaccgtttggatgatatggccattgcccaccactacagggactcctatcgacaccccagccacagggacctcagggacagaaacagacctatggggttgcatggcacacgtcaagaagaaatgattgatcacagactaacagacagagaatgggcagaagagtggaaacatcttgaccatctgttaaactgcataatggacatggtagaaaaaacaaggcgatctctcaccgtactaaggcggtgtcaagaagcagaccgggaagaattgaattactggatccggcggtacagtgacgccgaggacttaaaaaaaggtggcggcagtagcagcagccactctaggcagcagagtcccgtcaacccagacccagttgcactagacgcgcatcgggaattccttcacaggcctgcgtctggatacgtgccagaggagatctggaagaaagctgaggaggccgtcaatgaggtgaagcgccaggcgatgacggagctgcagaaggccgtgtctgaggcggagcggaaagcccacgacatgatcacaacagagagggccaagatggagcgcacggtcgccgaggccaaacggcaggcggcggaggacgcactggcagttatcaatcagcaggaggattcaagcgagagttgctggaattgtggccgtaaagcgagtgaaacctgcagtggctgtaacacagcccgatactgtggctcattttgccagcacaaagactgggagaagcaccatcacatctgtggacagaccctgcaggcccagcagcagggagacacacctgcagtcagctcctctgtcacgcccaacagcggggctgggagcccgatggacacaccaccagcagccactccgaggtcaaccaccccgggaaccccttccaccatagagacaacccctcgctagacgtgaactcagaactgtcggaggaaagacaacacaaccaacgcgaaaccaattcctcatcctcagatgctcaaagttgttttttttgtttgtttgtttattagatgaatt

SEQ ID NO: 8283 - DNA, 637 bp, Homo sapiens
agtcgcagctgctttccgaggaagccggtgttgccgagtcggagtctccctctgtagcccaggctggagtgcagcagtgtgatctcgggtcactgcatcctttacctcccaggttcaagcgattatcctgcctcggcctcctgagtagctgagactacagattgccaaaatgctttggagtttttaactgaatctaagaaaagtccaaaatagatttgagactgtaaaaacagaaactgcagcaagggggattcagtgccaatgcatcaacaaaaaagacaaccagagttagtggaaggaaatcttcctgttttcgtgttccccacggagctcatattttatgcagatgatcagtcaacacataagcaagtgttgacactgtacaatccctatgagtttgccttaaagttcaaagttttgtgtactactccaaataagtatgttgtcgttgatgctgcaggtgcagtaaagcctcagtgttgtgtggatattgtgattcgtcatcgagatgttcgatcctgtcactatggtgtaatagacaaattccgtctccaagtttccgagcaaagccaaaggaaggctttgggaagaaaagaggttgttgctactcttctcccatcagcaaaagaacaacaaa

SEQ ID NO: 8284 - DNA, 2204 bp, Homo sapiens
acagacaggcaggtgcaggagacggggtgagcgcttttgggctctagccccatggcagcatctaggggtgtgttacaattaatgctcttttagcagttgctgttcgcggatggctaagtgttaaaccagctcagtggagagtcagggtggcagccttttacgccctgtcctcttggtacccgggtctttgtctagcatccaggaagaatcaggtcctacagacttgaaggatggtgaatacagagattttattgaatgatggaggaggctttcagcaggatggatggggagctggaaagcggatggagtgagaagataatcttcccctggggtttggccatcccatggctgatctctctgacagtccccagccgaactcctctcgatgttcagacactctttctcctctctcctctgccacactgctctgctgctcttctgctcatggagcctgaggacaaccccagcaatgtggagaagcctggggcttgccctggctctctgtctcctcccatcgggaggaacagagagccaggaccaaagctccttatgtaagcaacccccagcctggagcataagagatcaagatccaatgctaaactccaatggttcagtgactgtggttgctcttcttcaagccagctgatacctgtgcatactgcaggcatctaaattagaagacctgcgagtaaaactgaagaaagaaggatattctaatatttcttatattgttgttaatcatcaaggaatctcttctcgattaaaatacacacatcttaagaataaggtttcagagcatattcctgtttatcaacaagaagaaaaccaaacagatgtctggactcttttaaatggaagcaaagatgacttcctcatatatgatagatgtggccgtcttgtatatcatcttggtttgcctttttccttcctaactttcccatatgtagaagaagccattaagattgcttactgtgaaaagaaatgtggaaactgctctctcacgactctcaaagatgaagacttttgtaaacgtgtatctttggctactgtggataaaacagttgaaactccatcgcctcattaccatcatgagcatcatcacaatcatggacatcagcaccttggcagcagtgagctttcagagaatcagcaaccaggagcaccaaatgctcctactcatcctgctcctccaggccttcatcaccaccataagcacaagggtcagcataggcagggtcacccagagaaccgagatatgccagcaagtgaagatttacaagatttacaaaagaagctctgtcgaaagagatgtataaatcaattactctgtaaattgcccacagattcagagttggctcctaggagctgatgctgccattgtcgacatctgatatttgaaaaaacagggtctgcaatcacctgacagtgtaaagaaaacctcccatctttatgtagctgacagggacttcgggcagaggagaacataactgaatcttgtcagtgacgtttgcctccagctgcctgacaaataagtcagcagcttatacccacagaagccagtgccagttgacgctgaaagaatcaggcaaaaaagtgagaatgaccttcaaactaaatatttaaaataggacatactccccaatttagtctagacacaatttcatttccagcatttttataaactaccaaattagtgaaccaaaaatagaaattagatttgtgcaaacatggagaaatctactgaattggcttccagattttaaattttatgtcatagaaatattgactcaaaccatattttttatgatggagcaactgaaaggtgattgcagcttttggttaatatgtctttttttttctttttccagtgttctatttgctttaatgagaatagaaacgtaaactatgacctaggggtttctgttggataattagcagtttagaatggaggaagaacaacaaagacatgctttccatttttttctttacttatctctcaaaacaatattactttgtcttttcaatcttctacttttaactaataaaataagtggattttgtattttaagatccagaaatacttaacacgtgaatattttgctaaaaaagcatatataactattttaaatatccatttatcttttgtatatctaagactcatcctgatttttactatcacacatgaataaagcctttgtatcttt

SEQ ID NO: 8285 - DNA, 587 bp, Homo sapiens
aaaaagacatcaagtcctttcatgctgtcctgggaaaggcggtttggaacaagttatcctgattctagagacgatgcaaagcactgtgctaggcaccaggagaatgcagaaagggcacatccccttccttcaaggagtttacagctttctcagaagcagaggggattcaacttcaatttttctgcagtggctctgggtccagccccttacttaaagatctggaaagcatgaagactgggctttttttcctatgtctcttgggaactgcagctgcaatcccgacaaatgcaagattattatctgatcattccaaaccaactgctgaaacggtagcacctgacaacactgcaatccccagtttaagggctgaagctgaagaaaatgaaaaagaaacagcagtatccacagaagacgattcccaccataaggctgaaaaatcatcagtactaaagtcaaaagaggaaagccatgaacagtcagcagaacagggcaagagttctagccaagagctgggattgaaggatcaagaggacagtgatggtcacttaagtgtgaatttggagtatgcaccaactgaaggtacattg

SEQ ID NO: 8286 - DNA, 2623 bp, Homo sapiens
agggacctacagcgggcgcggcgccggcggtctgcggccggcggtgtagacgccccttcgccgggacctggcacccgaatccggcctgccgggcctctttgtgcagcgccttgctgacgcccagggttctgatgtagaagcctacaccagggcctgaggttgtgaaactcatggcagtccacgcctgagaagagaaggcctgaaagagaaggaagagcccatgggacttgccacggttttgacttacatctgcaactccaaggctacaggcaggaagtaagaacagtgctcaagtggcagcagatactgactatggcttcatttcacagcttcacacagcagggtagcagaaaacaaagaatgtaagattggacccagttgcagctgttcaccaactctgtgatcttcaaaaagccatatagcttctccagacctgttaatcagggaagaagcagataactgaaggctggctttgagaagtttcgaggtcattattctctactgtgttacactcagctgctttcacctggaaaagcagaggaatcaggctgtctcctgcagctgtcttggtccattctgctgcccaagcagtacacttggtttcagatggaaatctaggatcccaagcatgggtacatttgtcggcagcatttggaagtatttttcgtcatcaggatggcagtcaatttgcaattcagtcatctcagtgcaaggtagtttggcaaaaagattatgacacttaatggatttttttcctcttttaaatctgtttacccagcattttgtagtataatgcaatgtaataacattgcattattttgagcatagtttagaagccaagaagatgctttcaaacagctgacataattcagttatggcccagatgtcctgccttccccatcacacattcatattaatggtcttagaaagctgtttctgaggcaacagtttcttcctcaatatcatcctactggggaaattttggcagttgatgtctaatgttgatttttttttcctgattgattttaattgttcactgggcactttggggtagaattgttttaaaaatttggttactgggaaagctagacaagcctttgctatggtgaaagagacagaaggaatatagatataatttgtaagtggttatgccattgggcttaatgctttgcatacattatctagtttgcatctcctgatcgccctttaagtttgcttacggtaaagcattattccttgcttggcaatgcacagagaaaaattatttgctgaaggaccctgcaaatgagggacaggatcagagttggaactgtaaaccctgccactccatttcatgtgatcttcatgggtacagcagctataccctgccccagcaatgagtatggtagagccacattcaaaggcggactttggggtcagcattcctgaaaagagctgcttaagtttgcttctacatccaaaaacgatgcagtcacagtcaactaacactgagcttgctgggcatctcctgaacagaaatgtatgtggtggtccatgtagcatgtatgcgatataattggccacccacctttccttttcacattaacatttatcacagaaacacattcatttgctacagggatatttcacaatttggctgaactttgagagaagtgggtgaggaaaaggtagtttcgtaactagtttatatataaacctaaattgtagtgagtactcttgtaagtggagcatcttttctatggtaattataaatggctgttagcccctttgcactaaagctaggtgggtggttttgccacagaggtaaattatctttcgggcggtataaccaaacaaataaaatataaagtgagattcagggcatgttctgaatacagcagttaattaggcagctaagaaaactgtattttagcccctctgactatgtgattggtatttttttaaattaaaaaatggaaaataatatttttaacaggttatgatatgtcagtcatttaatcctcacagtaactctgtggggtaggtaggtactgtttctatctcattttacaggtaaggaatcaaaacagtgggtatacccaggttgtatatctagaaagtgatagagctgggattttaaactttataatctgattccagaatctctacctttaaacactatgttaccacttacttctcttcaaattttattgagcattagatgtttccagtatttagaagtcaaatgcttcgtttttaataggaacttacacagtcttttatgtttttttatagccctcaatgtcactgatgtggattctcccaaactcgatactttgtttgtttttatgtccccataataagtctttaagaaaacagggcaagtgagctcaaaatcaaaagaaaacccaccaacagtgaatgcattcagggctatttccaggtctttcttttgaagaaagataagactcagtccagagagcacatctgtgacacaccgtgcctcttgcctttggtgcgtggcagtcatctttggctcatgctgtaccttattctacattagaaaactcactgtatgttgctaaataattttttgaaaacaggcagattaataaatggacatcttatttattgcaccataaaa

SEQ ID NO: 8287 - DNA, 567 bp, Homo sapiens
ataactcattaggcttgaatgagatgctttgaactgtggtgactacagtaatgttcccctctgcatgttgaagtgacaagtgcctccttggcctattgctgatcctgcctgctgtagaaatctccagctgtccaatatttggaagaaaactggctgtgcgtgtagtagagatgctctctctttgtgaagaaggccctgcatacattaaacaagtccggtactatttttctgcctggaaataaagtttctgagcatccctgcaatgaagagaacccagggaagttcctttttgaagtagttccaggaggcgatcgagatcggatgacagcaaatcatgaaagctacctcctcatggcaagcacccagaatgatatggaagactgggtgaagtcaatccgccgagtcatatggggacctttcggaggaggcatttttggacagaaactggaggatactgttcgttatgagaagagatatgggaaccgtctggctccgatgttggtggagcagtgcgtggactttatccgacaaagggggctgaaagaagagggtctctttcgactgcca

SEQ ID NO: 8288 - DNA, 1859 bp, Homo sapiens
agtgccccttctccaggatcaaggaactggggcggggggtgtttcctggaccccagtcctccgaatcagctcctagagtggaaccaggaaggattctggagccacagaagatagacagatggaaggtggggaccaaagtgaggaagagccgagggaacgcagccaggcaggtggaatgggaactctctggagccaagagagcactccagaagagaggctgcccgtggaagggagcaggccatgggcagtggccaggcgggtgctgacagctatcctgattttgggcctgctcctttgtttttctgtgcttttgttctacaacttccagaactgtggccctcgcccctgtgagacatctgtgtgtttggatctccgggatcattacctggcctctgggaacacaagtgtggccccctgcaccgacttcttcagctttgcctgtggaagggccaaagagaccaataattcttttcaggagcttgccacaaagaacaaaaaccgacttcggagaatactggaggtccagaattcctggcacccaggctctggggaggagaaagccttccagttctacaactcctgcatggatacacttgccattgaagctgcagggactggtcccctcagacaagttattgaggagcttggaggctggcgcatctctggtaaatggacttccttaaactttaaccgaacgctgagacttctgatgagtcagtatggccatttccctttcttcagagcctacctaggacctcatcctgcctctccacacacaccagtcatccagatagaccagccagagtttgatgttcccctcaagcaagatcaagaacagaagatctatgcccagatctttcgggaatacctgacttacctgaatcagctgggaaccttgctgggaggagacccaagcaaggtgcaagaacactcttccttgtcaatctccatcacttcacggctgttccagtttctgaggcccctggagcagcggcgggcacagggcaagctcttccagatggtcactatcgaccagctcaaggaaatggcccccgccatcgactggttgtcctgcttgcaagcgacattcacaccgatgtccctgagcccttctcagtccctcgtggtccatgacgtggaatatttgaaaaacatgtcacaactggtggaggagatgctgctaaagcagagggactttctgcagagccacatgatcttagggctggtggtgaccctttctccagccctggacagtcaattccaggaggcacgcagaaagctcagccagaaactgcgggaactgacagagcaaccacccatggaggcttttgaaaccccaggatgatgcctcctagaggccttgctgtcaaattcaataggcaataacatgaaggatttactcagccaggctcatgagaccagctctgaggaagctgtgcttttcttgtactgatcggtgatgtgcatcaccctaagggatagtaaacagatgaaacccagaaagtccagtcaaaagagcaccctctgggaatgaagatctagtgaagactggggagacagatgaggaaagagtcctgaacaggagccactcattccagctttgtctccatagcctgcccgcccacgatggatgaagtgcgtggaggagacaggcacgttcttcgagcccacgctggcggctttgtttgttcgtgaggcctttggcccgagcacccgaagtgctgtatgtgagagctcttcccagcccacatccctccaccccttcctacccaaagcagccttccctcttctattaactttgactttctcagtggtgtgtgtgattggggaattgggcagtcagagaagggccactgaga

SEQ ID NO: 8289 - DNA, 4944 bp, Homo sapiens
gcggccgcagctgcgagcaacagatccggacgccgcgagctgacccgctctgctgttgggcgatttttttttaattgcagaaaaatttattaaattggaaaatcttgcgtttttcaatggcgctggccccgggtcagcgggcgattttctctgcatcaagatgggctttgccgtttccgtagtgggcaccagtggtggcctgattgtcagtcttctcccggcatttttaaggccaggagccgagcgctgcttgtaggcgaataccctacagagcggtttggctttttaaattactgttattattttgggcagagaacagtcggtctggtgcaccccgtcctcgctgcagaagaggctgcgagtccgaggtgggtctctcggaaggtgaaattccttctggggtgagcgagccccggccccgcgcgcagtccagcggccccgcgtgtgtgccctcgccctgccggagccgggaaaatggaggctgtgattgagaaggaatgcagcgcgctcggaggcctcttccagaccatcatcagcgacatgaaggggagctatccagtttgggaagatttcataaacaaagcaggaaagctgcagtcccagcttcggacaacagtagtagcagcagctgccttcttggacgcctttcagaaagtggctgacatggccaccaacacacgtggtgggaccagggagattggatctgctctcaccaggatgtgcatgaggcacagaagcattgaagccaagctgaggcagttttcgagcgctttaattgattgtctgataaacccacttcaagaacagatggaagaatggaagaaagtggccaaccagctggataaagaccacgcaaaagaatataagaaagcccgccaagagataaaaaagaagtcctcggatacgctgaaactgcagaagaaagcaaaaaaagggagaggtgatatccagcctcagttggacagtgctctccaagatgtcaatgataagtatctcttattggaagaaacagaaaagcaggctgtccggaaggctttgattgaagaacgtggccgattctgtaccttcatctctatgctgcggccagtgattgaagaagaaatctcaatgctaggggaaataacccaccttcagaccatctcggaagatctaaaaagcctgaccatggaccctcacaaactgccctcctcaagtgaacaggtgattctggacttgaaaggttctgattacagctggtcgtatcagacgccaccctcttcccccagcaccaccatgtccagaaagtccagtgtctgcagcagcctgaacagtgtcaacagcagtgactcccggtccagcggctcccactcgcattcccccagctcacattaccgctaccgcagctccaacctggcccagcaggctcctgtgaggctgtccagcgtgtcctcccatgactcaggattcatatcccaggatgccttccagtccaagtcaccatcccccatgccgccagaggcccccaaccagttgtctaacgggttttctcactatagtttatcaagtgagtcccacgtggggcccacgggtgcaggccttttccctcattgcctgcctgcctcccgcctgctccctcgggtcacctctgtccaccttccagactacgctcattattacaccattgggcccggcatgttcccgtcatctcagatccctagctggaaggactgggctaagcctgggccctatgaccagcctctggtgaacaccctgcagcgccgcaaagagaagcgagaaccggaccccaacgggggaggacccactaccgccagcggcccacctgcagcagctgaggaggctcagagaccacggagcatgactgtatcggctgccaccaggcctggtgaggagatggaggcttgtgaggagctggccctggccctgtctcggggcctgcagctggacacccagaggagcagccgggactcgcttcagtgctccagcggctacagcacccagacaaccaccccctgctgctctgaggacaccatcccttcccaagtttcagattatgattatttctctgtaagtggtgaccaggaggcagatcagcaggagttcgacaagtcctccaccattccaagaaacagcgacatcagccagtcctaccgacggatgttccaagccaagcgtccagcctcaactgctggcctccccaccaccctgggacctgctatggtcactccaggggttgcaactatccgacggaccccttccaccaagccttctgtccgccggggaaccattggagctggtcccatccccatcaagacacccgtgatccctgtcaagaccccaaccgtcccagacctcccaggggtgttgccagcccctccagatgggccagaagagcggggggagcacagccctgagtcgccatctgtgggtgagggcccccaaggtgtcaccagcatgccctcctcaatgtggagcggccaagcttccgttaaccctccacttccaggcccgaagcccagtatccctgaggagcacagacaggcaattccagaaagtgaagctgaagaccaggaacgggaacccccaagtgccactgtctccccaggccagattccagagagtgaccctgcagacctgagcccaagggatactccacaaggagaagacatgctgaacgccatccgaaggggcgtgaaactgaagaagaccacgacaaacgatcgctcagcccctcgcttttcttaggttcacaagaaatgcgccggtggggaatgaactgtttcattaataaaacctaatttgtcttgatccattccactctataataaaacaaaagattttgtaggcaactcggaatatagctcttttgaaagtactcgacacctttagataagaattaaaaccaacctatgtaactgacataatcttgatcttttaatttgtaaatattgacaattttctttctgcacattttaatcttagtttcccttttgatttttctgaaggtgccaaattccatttaacttttttacaagtctttgtaaaattttaaatgcataaagggggttggggcaggggaaccacgaagtagttaattttagaaaaggatttactatacttcactcttctttttttttccccacaagcttttgtagatgcattgtagtagtctagcttagaagcaaatgcaagttattttaatgtacaaactaaatgggtaagaggtaaaatcttcatttaaatatactatgttctggatgaaaagagcaggagtaacaattgatgagcaatattcagagtgaagtaaatctggaaatggtagactgtgttgggattggggggagggccatgggaggggtacatcgtcaacatagccgatcctgttacatttaagagtagcctcgtaggttgaatttcttctggtagcttcatggtaaatgcatccgaataagccatactggattgcagtgtttgtttctgtagggtgtttaaggacttgacttcctttctcccatgattcctctggactgcacacagcacccacaaccagccccatgcatgctgctgcctctgggcagtcgtagaatctcccacttcagtttctcgttgattgtactcacctttatggaatccaaatacatccaaaagggtaaggcagttttaaaaatgtgaaaacatttaaaaatgataatagcagggaattcttagattatagtaaatgccttttacttaactgtgcccagcaggctgggtgcgttaaaaagcccaagtattttgaaaaaactcgaacagatttgacaagggtagccagcttggagtctagcaacttgccaatgtgtttaccaatctgggggcttgtttttcttttcttctttcaaataaatggcagttaactggctttacagtaaacattgaagagaggaggatttgtttattgtcactgggaatctgaccactatactgtcctttttttgtattctgggtaaatgttttttggaaaagatttgtcttttctaagtggaagttaaatttgttatactgcccatcccctaaagccaacagagatttgtagatttaaagggatcacatttgaagacaatagtgtttaagaaagcaagcaagtcccttagcagtcaggtcataacagggcacatttctgaccgaaccctctcaaggcagaggaggagtttggtgggtttcatacaccctgcagattcctgttggctctaaccctcaattacctaatcttatgctttaacacataactgcattggatgtgagagtaacgtaccgtatggtcattgttctatatattaacattgaacactgctgcgattgctcaaggacattttatgttacggctttaaagcaaaggcatgattattagaaactatttaagcttttttctttgaaaaacaagctccttttacagaatataaacaacagtagtgcctgtggtttagcccaccaatcttgatgactaaaagtagctgatgcattgtgcatatgatgcttgagatggtttttgcaaaagcagaaatcgctgcaaggtaatcacaatagataaaagtggtattttaaacctttgaaataaatggatgtaactgtaccttggtacagcttttcacttgtttagtttttaaacgttagtataatctgaataaataaaatgttgccaaattcaatgtagaaagaatgtgacaacacaccttgggtagttctgcttgtgtttttgcatattgtaaaagcagtgtcacagctaaaaagaaagaaatcgtttctaacagtaaattattgtgctttagttgctagtttgtactgagagttgacctctccctgtgcagttttttgttctaaacttgtataaataacaattgtgtaatgtgtctccctcctacattgtaacaattgcttcagcctacgttataaataaagaaccactagatt

SEQ ID NO: 8290 - DNA, 740 bp, Homo sapiens
ttatcgggctcaccaaatacagctgcagtatgaattccatcttctacacaacagtaaaccagaatgttcatgttcacagcgttcatctcccatcctgttgtctaacgcacatggtttttttaaacttttctaagattgcatgagattctgcaacacaactgattataaaaacacttgaagtttttacctttttttttactttccaactctcgtgaatgtacagaggactttccagaagctacatgatgtgtgatatttcagctgatgaaatgtagatgtatagagcttactcacatagcatattggtatatcaaaatgaaatgcaaggaaccaaaaataacataattgaaggcagtaaaagtgaaattaaataggaagatcatcagtcaaggaagacccactggagaggacagaaaatgaagcagtgttttatcatgtgtatttcagcaggtcttcttgaaatttaactaaaaatatgactgctctctcttcagagaactgctcttttcagtaccagttacgtcaaacaaaccagcccctagatgttaactatctgctattcttgatcatacttgggaaaatattattaaatatccttacactaggaatgagaagaaaaaacacctgtcaaaattttatggaatatttttgcatttcactagcattcgttgatcttttacttttggtaaacatttccattatattgtatttcagggattttgtacttttaagcattaggt

SEQ ID NO: 8291 - DNA, 1457 bp, Homo sapiens
tttccagcaggagctgcgagcacagtgctggctcacaacaagatgctcaaggtgtcagccgtactgtgtgtgtgtgcagccgcttggtgcagtcagtctctcgcagctgccgcggcggtggctgcagccggggggcggtcggacggcggtaattttctggatgataaacaatggctcaccacaatctctcagtatgacaaggaagtcggacagtggaacaaattccgagactgcaaactagaatatcaggcatgtgtcttaggaaaacagatctcagtcaaatgtgaaggacattgcccatgtccttcagataagcccaccagtacaagcagaaatgttaagagagcatgcagtgacctggagttcagggaagtggcaaacagattgcgggactggttcaaggcccttcatgaaagtggaagtcaaaacaagaagacaaaaacattgctgaggcctgagagaagcagattcgataccagcatcttgccaatttgcaaggactcacttggctggatgtttaacagacttgatacaaactatgacctgctattggaccagtcagagctcagaagcatttaccttgataagaatgaacagtgtaccaaggcattcttcaattcttgtgacacatacaaggacagtttaatatctaataatgagtggtgctactgcttccagagacagcaagacccaccttgccagactgagctcagcaatattcagaagcggcaaggggtaaagaagctcctaggacagtatatccccctgtgtgatgaagatggttactacaagccaacacaatgtcatggcagtgttggacagtgctggtgtgttgacagatatggaaatgaagtcatgggatccagaataaatggtgttgcagattgtgctatagattttgagatctccggagattttgctagtggcgattttcatgaatggactgatgatgaggatgatgaagacgatattatgaatgatgaagatgaaattgaagatgatgatgaagatgaaggggatgatgatgatggtggtgatgaccatgatgtatacatttgattgatgacagttgaaatcaataaattctacatttctaatatttacaaaaatgatagcctatttaaaattatcttcttccccaataacaaaatgattctaaacctcacatatattttgtataattatttgaaaaattgcagctaaagttatagaactttatgtttaaataagaatcatttgctttgagtttttatattccttacacaaaaagaaaatacatatgcagtctagtcagacaaaataaagttttgaagtgctactataataagtttttcacgagaacaaactttgtaaatcttccataagcaaaatgacagctagtgcttgggatcgtacatgttaattttctgaaagataattctaagtgaaatttaaaataaataaatttttaatgacct

SEQ ID NO: 8292 - DNA, 596 bp, Homo sapiens
aagcaaaggggacaaaagcttatgaggttcactttattcttcctctttctttctcagtggacacgtcgatctgacaatgctaggagcgatgcaggtttccaaatatggtgacctggctaactggatgatacctgggaagatggtgaaaggaatgggaggtgctatggatttagtgtccagtgcgaaaaccaaagtggtggtcaccatggagcattctgcaaagggaaatgcacataaaatcatggagaaatgtacattaccattgactggaaagcaatgtgtcaaccgcattattactgaaaaggctgtgtttgatgtggacaagaagaaagggttgactctgattgagctctgggaaggcctgacagtggatgacgtacagaagagtactgggtgtgattttgcagtttcaccaaaactcatgccaatgcagcagatcgcaaattgaaatatggatatttgtaccaggctgcgtgtttttcattttaaacacacaagatttaattgaaaggacatcaataatcataattgtgtatttaacaggtggttttttattagttttcttgtgtttcagactttatgcagccatataaact

SEQ ID NO: 8293 - DNA, 4789 bp, Homo sapiens
tcttggaatacagaagagaaactagaaatatacgtattttgtttcacatttgaacagtcattcttgaggaatactccatacctgagtagacagccatgtggccatcgcagctactaattttcatgatgctcttagctccaataattcatgctttcagccgtgccccaattccaatggctgtggtccgcagagagctatcctgtgagagctatcctatagagcttcgctgtccaggaacagacgtcatcatgatagaaagtgccaactatggcaggactgatgacaaaatttgtgactctgaccctgctcagatggagaatatccgatgttatctgccagatgcctataagattatgtctcaaagatgcaataacagaacccagtgtgcagtggtggcaggtcctgatgtttttccagacccgtgtccaggaacctataaataccttgaagtgcagtatgaatgtgtcccttacaaagtggaacaaaaagtttttctttgtcctggactactaaaaggagtataccagagtgaacatttgtttgagtccgaccaccaatctggggcgtggtgcaaagaccctctgcaggcatctgacaagatttattatatgccctggactccctacagaactgataccctgactgagtattcatccaaggatgacttcattgctggaagaccaactacaacctacaagctccctcacagggtggatggcacaggatttgtagtgtatgatggagctttgttcttcaacaaagagcgcaccaggaacatagtaaagtttgatttgcggactaggataaagagtggagaggctatcatagcaaatgccaattaccatgatacctccccttaccgatggggaggcaaatctgacatagacctggcagtagatgagaatgggctatgggtaatctatgcaacagaacaaaacaatggtaaaattgtcattagtcaattgaacccttacaccctacggatcgaaggaacatgggatactgcatatgataaaaggtcagcttccaatgcctttatgatttgtggaattctgtatgtggtcaaatctgtatatgaggatgatgacaatgaggctactggaaataagattgactacatttacaacactgaccaaagcaaggatagtttggtggatgtaccctttcctaattcataccagtacattgcagctgtggattacaaccccagggacaacctactttatgtatggaataactatcacgtcgtgaaatattctttggattttggacctctggatagtagatcagggcaggcacatcatggacaagtttcatacatttctccgccaattcaccttgactctgagctagaaagaccctctgttaaagatatctctaccacaggacctcttggcatgggaagcactaccaccagtaccacccttcggaccacaactttgagcccaggaaggagtaccaccccgtcagtgtcaggaagaagaaaccggagtactagtaccccatctccagctgtcgaggtacttgatgacatgaccacacaccttccatcagcatcgtcccaaatcccagctctcgaagagagctgtgaggctgtggaagcccgagaaatcatgtggtttaagactcgtcaaggacagatagcaaagcagccatgccctgcaggaactataggtgtatcaacttatctatgccttgctcctgatggaatttgggatccccaaggtccagatctcagcaactgttcttctccttgggtcaatcatataacacagaagttgaaatctggtgaaacagctgccaacattgctagagagctggctgaacagacaagaaatcacttgaatgctggggacatcacctactctgtccgggccatggaccagctggtaggcctcctagatgtacagcttcggaacttgaccccaggtggaaaagatagtgctgcccggagtttgaacaagcttcagaaaagagagcgctcttgcagagcctatgtccaggcaatggtcgagacagttaacaacctccttcagccacaagctttgaatgcatggagagacctgactacgagtgatcagctgcgtgcggccaccatgttgcttcatactgtggaggaaagtgcttttgtgctggctgataaccttttgaagactgacattgtcagggagaatacagacaatattaaattggaagttgcaagactgagcacagaaggaaacttagaagacctaaaatttccagaaaacatgggccatggaagcactatccagctgtctgcaaataccttaaagcaaaatggccgaaatggagagatcagagtggcctttgtcctgtataacaacttgggtccttatttatccacggagaatgccagtatgaagttgggaacggaagctttgtccacaaatcattctgttattgtcaattcccctgttattacggcagcaataaacaaagagttcagtaacaaggtttatttggctgatcctgtggtatttactgttaaacatatcaagcagtcagaggaaaatttcaaccctaactgttcattttggagctactccaagcgtacaatgacaggttattggtcaacacaaggctgtcggctcctgacaacaaataagacacatactacatgctcttgtaaccacctaacaaattttgcagtactgatggcacatgtggaagttaagcacagtgatgcggtccatgacctccttctggatgtgatcacgtgggttggaattttgctgtcccttgtttgtctcctgatttgcatcttcacattttgctttttccgggggctccagagtgaccgtaacaccatccacaagaacctctgcatcagtctctttgtagcagagctgctcttcctgattgggatcaaccgaactgaccaaccaattgcctgtgctgttttcgctgccctgttacatttcttcttcttggctgccttcacctggatgttcctggagggggtgcagctttatatcatgctggtggaggtttttgagagtgaacattcacgtaggaaatacttttatctggtcggctatgggatgcctgcactcattgtggctgtgtcagctgcagtagactacaggagttatggaacagataaagtatgttggctccgacttgacacctacttcatttggagttttataggaccagcaactttgataattatgcttaatgtaatcttccttgggattgctttatataaaatgtttcatcatactgctatactgaaacctgaatcaggctgtcttgataacatcaagtcatgggttataggtgcaatagctcttctctgcctattaggattgacctgggcctttggactcatgtatattaatgaaagcacagtcatcatggcctatctcttcaccattttcaattctctacagggaatgtttatatttattttccattgtgtcctacagaagaaggtacgaaaagagtatgggaaatgcctgcgaacacattgctgtagtggcaaaagtacagagagttccattggttcagggaaaacatctggttctcgaactcctggacgctactccacaggctcacagagccgaatccgtagaatgtggaatgacacggttcgaaagcagtcagagtcttcctttattactggagacataaacagttcagcgtcactcaacagaggagccatggctaatcatcttataagcaatgctctgcttcgtccgcatggtactaacaatccctataatacattgcttggggaaccggcggtctgtaacaacccttctgtcagcatgtacaacgcacaagagccctacagagagacaagtatgggagtaaagctaaacattgcatatcaaataggggcttctgaacaatgccagggatacaagtgtcatggatactctaccactgaatggtaaccatggcaatagttacagcattgccagcggcgaatacctgagcaactgtgtgcaaatcatagaccgtggctataaccataacgagaccgccctagagaaaaagattctgaaggaactcacttccaactatatcccttcttacctgaacaaccatgagcgctccagtgaacagaacaggaatctgatgaacaagctggtgaataaccttggcagtggaagggaagatgatgccattgtcctggatgatgccacctcgtttaaccacgaggagagtttgggcctggaactcattcatgaggaatctgatgctcctttgctgcccccaagagtatactccaccgagaaccaccagccacaccattataccagaaggcggatcccccaagaccacagtgagagctttttccctttgctaaccaacgagcacacagaagatctccagtcaccccatagagactctctctataccagcatgccgacactggctggtgtggccgccacagagagtgttaccaccagcacccagaccgaacccccaccggccaaatgtggtgatgccgaagatgtttactacaaaagcatgccaaacctaggctccagaaaccacgtccatcagctgcatacttactaccagctaggtcgcggcagcagtgatggatttatagttcctccaaacaaagatgggacccctcccgagggaagttcaaaaggaccggctcatttggtcactagtctatagaagatgacacagaaattggaaccaacaaaactgctaacaccttgttgactgttctgagttgatataagcagtggtaataatgtgtgtactcctaaatctttatgctgtcctctaaagacaaacacaaact

SEQ ID NO: 8294 - DNA, 678 bp, Homo sapiens
gaaagagagagagagagagagatcgagattgagatcttaagaaagagagcaaggaggaagagcccgactgtaggcaccaccgggcgccgaatggctgttttctaactgggatcctcggtgacgtatggctgcctgccccttggcagctgtctttatggaccagtaggcagagcgaaattgacgctgacaagacttttgcatcttggaagggactgtaatctactgtagtgaagaacagagcctctcaatcagacgggtgtaaataagagacggaggggagtccaaaagaaaaggaagaggaggaaaaacaagtgtgtgttggggggaacagggggaaaagcatttttggtggatggtatgaagccagccatggaaactgcagccgaggaaaatactgaacaaagccaagagagaaaaggctgctttgaatgctgcatcaagtgtctgggaggagtcccctacgcctccctggtggccaccatcctctgcttctccggggtggccttattctgcggctgtgggcatgtggctctcgcaggcaccgtggcgattcttgagcaacacttctccaccaacgccagtgaccatgccttgctgagcgaggtgatacaactgatgcagtatgtcatctatggaattgcgtcctttttcttcttgtatgggatcattctgttggca

SEQ ID NO: 8295 - DNA, 776 bp, Homo sapiens; identical to SEQ ID NO: 6929

SEQ ID NO: 8296 - DNA, 3548 bp, Homo sapiens
tgccctttagagcctggagagggcatgcagagggcctgtggcttgtcccagccggaggttccccttaaggggaccagctgccttctctggggagctgtctatggggtccccgcagccctccagtggaggcagaggccctggctcctgaccgcacttgttttgcataggactgggctaagcctgggccctatgaccagcctctggtgaacaccctgcagcgccgcaaagagaagcgagaaccggaccccaacgggggaggacccactaccgccagcggcccacctgcagcagctgaggaggctcagagaccacggagcatgactgtatcggctgccaccagggtgatgctcttgttctcagtagctggttggggccacctcagcctggctggggatcacattctggccagcaactggggggccaaggcagccttgcagctggagggacctgggctccattccctgacttcctgctctacagcaaagtccctgggaaaaaaaccttgtgtgggaatgagagaggcagaactttctagggtcagagtgggacccaagcaagtcaatagccccctggccccacagacatgtagtgctcacgggggcagaacaggagtgctgttgagccccccccctaaagcaacctgtgtatttctctcctccaacctgcagcctggtgaggagatggaggcttgtgaggagctggccctggccctgtctcggggcctgcagctggacacccagaggagcagccgggactcgcttcagtgctccagcggctacagcacccagacaaccaccccctgctgctctgaggacaccatcccttcccaagtttcagattatgattatttctctgtaagtggtgaccaggaggcagatcagcaggagttcgacaagtcctccaccattccaagaaacagcgacatcagccagtcctaccgacggatgttccaagccaagcgtccagcctcaactgctggcctccccaccaccctgggacctgctatggtcactccaggggttgcaactatccgacggaccccttccaccaagccttctgtccgccggggaaccattggagctggtcccatccccatcaagacacccgtgatccctgtcaagaccccaaccgtcccagacctcccaggggtgttgccagcccctccagatgggccagaagagcggggggagcacagccctgagtcgccatctgtgggtgagggcccccaaggtgtcaccagcatgccctcctcaatgtggagcggccaagcttccgttaaccctccacttccaggcccgaagcccagtatccctgaggagcacagacaggcaattccagaaagtgaagctgaagaccaggaacgggaacccccaagtgccactgtctccccaggccagattccagagagtgaccctgcagacctgagcccaagggatactccacaaggagaagacatgctgaacgccatccgaaggggcgtgaaactgaagaagaccacgacaaacgatcgctcagcccctcgcttttcttaggttcacaagaaatgcgccggtggggaatgaactgtttcattaataaaacctaatttgtcttgatccattccactctataataaaacaaaagattttgtaggcaactcggaatatagctcttttgaaagtactcgacacctttagataagaattaaaaccaacctatgtaactgacataatcttgatcttttaatttgtaaatattgacaattttctttctgcacattttaatcttagtttcccttttgatttttctgaaggtgccaaattccatttaacttttttacaagtctttgtaaaattttaaatgcataaagggggttggggcaggggaaccacgaagtagttaattttagaaaaggatttactatacttcactcttctttttttttccccacaagcttttgtagatgcattgtagtagtctagcttagaagcaaatgcaagttattttaatgtacaaactaaatgggtaagaggtaaaatcttcatttaaatatactatgttctggatgaaaagagcaggagtaacaattgatgagcaatattcagagtgaagtaaatctggaaatggtagactgtgttgggattggggggagggccatgggaggggtacatcgtcaacatagccgatcctgttacatttaagagtagcctcgtaggttgaatttcttctggtagcttcatggtaaatgcatccgaataagccatactggattgcagtgtttgtttctgtagggtgtttaaggacttgacttcctttctcccatgattcctctggactgcacacagcacccacaaccagccccatgcatgctgctgcctctgggcagtcgtagaatctcccacttcagtttctcgttgattgtactcacctttatggaatccaaatacatccaaaagggtaaggcagttttaaaaatgtgaaaacatttaaaaatgataatagcagggaattcttagattatagtaaatgccttttacttaactgtgcccagcaggctgggtgcgttaaaaagcccaagtattttgaaaaaactcgaacagatttgacaagggtagccagcttggagtctagcaacttgccaatgtgtttaccaatctgggggcttgtttttcttttcttctttcaaataaatggcagttaactggctttacagtaaacattgaagagaggaggatttgtttattgtcactgggaatctgaccactatactgtcctttttttgtattctgggtaaatgttttttggaaaagatttgtcttttctaagtggaagttaaatttgttatactgcccatcccctaaagccaacagagatttgtagatttaaagggatcacatttgaagacaatagtgtttaagaaagcaagcaagtcccttagcagtcaggtcataacagggcacatttctgaccgaaccctctcaaggcagaggaggagtttggtgggtttcatacaccctgcagattcctgttggctctaaccctcaattacctaatcttatgctttaacacataactgcattggatgtgagagtaacgtaccgtatggtcattgttctatatattaacattgaacactgctgcgattgctcaaggacattttatgttacggctttaaagcaaaggcatgattattagaaactatttaagcttttttctttgaaaaacaagctccttttacagaatataaacaacagtagtgcctgtggtttagcccaccaatcttgatgactaaaagtagctgatgcattgtgcatatgatgcttgagatggtttttgcaaaagcagaaatcgctgcaaggtaatcacaatagataaaagtggtattttaaacctttgaaataaatggatgtaactgtaccttggtacagcttttcacttgtttagtttttaaacgttagtataatctgaataaataaaatgttgccaaattcaatgtagaaagaatgtgacaacacaccttgggtagttctgcttgtgtttttgcatattgtaaaagcagtgtcacagct

SEQ ID NO: 8297 - DNA, 4843 bp, Homo sapiens
aaaatcatcagtcttggaatacagaagagaaactagaaatatacgtattttgtttcacatttgaacagtcattcttgaggaatactccatacctgagtagacagccatgtggccatcgcagctactaattttcatgatgctcttagctccaataattcatggtggcaagcacagtgaacgacatcctgcccttgctgctccattgcgacacgctgagcgcagcccaggaggcgctcttccacccagacatctgcttcagcagccagctgcagagcgcaccgctgctcatcgtggacaagggccccgtggagctaccagaggagttcgcggtccaggtgcccaaggagcacagattgcagcgcaagctttcagccgtgccccaattccaatggctgtggtccgcagagagctatcctgtgagagctatcctatagagcttcgctgtccaggaacagacgtcatcatgatagaaagtgccaactatggcaggactgatgacaaaatttgtgactctgaccctgctcagatggagaatatccgatgttatctgccagatgcctataagattatgtctcaaagatgcaataacagaacccagtgtgcagtggtggcaggtcctgatgtttttccagacccgtgtccaggaacctataaataccttgaagtgcagtatgaatgtgtcccttacaaagtggaacaaaaagtttttctttgtcctggactactaaaaggagtataccagagtgaacatttgtttgagtccgaccaccaatctggggcgtggtgcaaagaccctctgcaggcatctgacaagatttattatatgccctggactccctacagaactgataccctgactgagtattcatccaaggatgacttcattgctggaagaccaactacaacctacaagctccctcacagggtggatggcacaggatttgtagtgtatgatggagctttgttcttcaacaaagagcgcaccaggaacatagtaaagtttgatttgcggactaggataaagagtggagaggctatcatagcaaatgccaattaccatgatacctccccttaccgatggggaggcaaatctgacatagacctggcagtagatgagaatgggctatgggtaatctatgcaacagaacaaaacaatggtaaaattgtcattagtcaattgaacccttacaccctacggatcgaaggaacatgggatactgcatatgataaaaggtcagcttccaatgcctttatgatttgtggaattctgtatgtggtcaaatctgtatatgaggatgatgacaatgaggctactggaaataagattgactacatttacaacactgaccaaagcaaggatagtttggtggatgtaccctttcctaattcataccagtacattgcagctgtggattacaaccccagggacaacctactttatgtatggaataactatcacgtcgtgaaatattctttggattttggacctctggatagtagatcagggcaggcacatcatggacaagtttcatacatttctccgccaattcaccttgactctgagctagaaagaccctctgttaaagatatctctaccacaggacctcttggcatgggaagcactaccaccagtaccacccttcggaccacaactttgagcccaggaaggagtaccaccccgtcagtgtcaggaagaagaaaccggagtactagtaccccatctccagctgtcgaggtacttgatgacatgaccacacaccttccatcagcatcgtcccaaatcccagctctcgaagagagctgtgaggctgtggaagcccgagaaatcatgtggtttaagactcgtcaaggacagatagcaaagcagccatgccctgcaggaactataggtgtatcaacttatctatgccttgctcctgatggaatttgggatccccaaggtccagatctcagcaactgttcttctccttgggtcaatcatataacacagaagttgaaatctggtgaaacagctgccaacattgctagagagctggctgaacagacaagaaatcacttgaatgctggggacatcacctactctgtccgggccatggaccagctggtaggcctcctagatgtacagcttcggaacttgaccccaggtggaaaagatagtgctgcccggagtttgaacaagcttcagaaaagagagcgctcttgcagagcctatgtccaggcaatggtcgagacagttaacaacctccttcagccacaagctttgaatgcatggagagacctgactacgagtgatcagctgcgtgcggccaccatgttgcttcatactgtggaggaaagtgcttttgtgctggctgataaccttttgaagactgacattgtcagggagaatacagacaatattaaattggaagttgcaagactgagcacagaaggaaacttagaagacctaaaatttccagaaaacatgggccatggaagcactatccagctgtctgcaaataccttaaagcaaaatggccgaaatggagagatcagagtggcctttgtcctgtataacaacttgggtccttatttatccacggagaatgccagtatgaagttgggaacggaagctttgtccacaaatcattctgttattgtcaattcccctgttattacggcagcaataaacaaagagttcagtaacaaggtttatttggctgatcctgtggtatttactgttaaacatatcaagcagtcagaggaaaatttcaaccctaactgttcattttggagctactccaagcgtacaatgacaggttattggtcaacacaaggctgtcggctcctgacaacaaataagacacatactacatgctcttgtaaccacctaacaaattttgcagtactgatggcacatgtggaagttaagcacagtgatgcggtccatgacctccttctggatgtgatcacgtgggttggaattttgctgtcccttgtttgtctcctgatttgcatcttcacattttgctttttccgggggctccagagtgaccgtaacaccatccacaagaacctctgcatcagtctctttgtagcagagctgctcttcctgattgggatcaaccgaactgaccaaccaattgcctgtgctgttttcgctgccctgttacatttcttcttcttggctgccttcacctggatgttcctggagggggtgcagctttatatcatgctggtggaggtttttgagagtgaacattcacgtaggaaatacttttatctggtcggctatgggatgcctgcactcattgtggctgtgtcagctgcagtagactacaggagttatggaacagataaagtatgttggctccgacttgacacctacttcatttggagttttataggaccagcaactttgataattatgcttaatgtaatcttccttgggattgctttatataaaatgtttcatcatactgctatactgaaacctgaatcaggctgtcttgataacatcaagtcatgggttataggtgcaatagctcttctctgcctattaggattgacctgggcctttggactcatgtatattaatgaaagcacagtcatcatggcctatctcttcaccattttcaattctctacagggaatgtttatatttattttccattgtgtcctacagaagaaggtacgaaaagagtatgggaaatgcctgcgaacacattgctgtagtggcaaaagtacagagagttccattggttcagggaaaacatctggttctcgaactcctggacgctactccacaggctcacagagccgaatccgtagaatgtggaatgacacggttcgaaagcagtcagagtcttcctttattactggagacataaacagttcagcgtcactcaacagagaggggcttctgaacaatgccagggatacaagtgtcatggatactctaccactgaatggtaaccatggcaatagttacagcattgccagcggcgaatacctgagcaactgtgtgcaaatcatagaccgtggctataaccataacgagaccgccctagagaaaaagattctgaaggaactcacttccaactatatcccttcttacctgaacaaccatgagcgctccagtgaacagaacaggaatctgatgaacaagctggtgaataaccttggcagtggaagggaagatgatgccattgtcctggatgatgccacctcgtttaaccacgaggagagtttgggcctggaactcattcatgaggaatctgatgctcctttgctgcccccaagagtatactccaccgagaaccaccagccacaccattataccagaaggcggatcccccaagaccacagtgagagctttttccctttgctaaccaacgagcacacagaagatctccagtcaccccatagagactctctctataccagcatgccgacactggctggtgtggccgccacagagagtgttaccaccagcacccagaccgaacccccaccggccaaatgtggtgatgccgaagatgtttactacaaaagcatgccaaacctaggctccagaaaccacgtccatcagctgcatacttactaccagctaggtcgcggcagcagtgatggatttatagttcctccaaacaaagatgggacccctcccgagggaagttcaaaaggaccggctcatttggtcactagtctatagaagatgacacagaaattggaaccaacaaaactgctaacaccttgttgactgttctgagttgatataagcagtggtaataatgtgtgtactcctaaatctttatgctgtcctctaaagacaaacacaaactctcagactttttttttttta

SEQ ID NO: 8298 - DNA, 2718 bp, Homo sapiens
aaggtgccatgttacattttacaaggttacaaattgcagtcttcaaataatgaaaatagtctccaggtggtcctccactttctgagctaggctttatacctaatacctctgaagatcagggggaaaaagccaaaagagggaaataaagagtctctttattaaaaaagtatcaagttatgcccacttctggtgaaattttgaatagagaaaatggcctgatttagataaatcaactgaaaaagtgtacacaggagcccatttctttatccaatcctggagttaaaggcagtaacattcgttagtttcctctagcaaataagaaaaagtgcatctcagaggattctgaaacggtgatatagctacttaaaggcactgtagctgcaagaatcccaatcagttcaacagatgttttctgagctcctactatgtgcccacactgtgccaggtactagcaataccaaggtgaaaaacaacaacaacaaagccctgtcattgaagagctcactgtctaatctagggatggcaaggacattttctctctcctgccagccctcagagtatggtattgaggaggattctaaggtctagtctgggtttggtgggccatccattagtgatgtctgacatggttgtagaagttgagagtagcagcttacatgtcatatgttttgacacatatggtctagtcagaatcatttcaatttcatttgaaagaggatatagcttctgtactctgttatgctcctgtcttccaaatcaacaactgtattttactggaggttacctgtatccagagggtttgtaacaagtagagaccctttgcattttgtgtgattaagagcaaggcaccgttaggaaatgagagttggattccatcactatctccacactatgcagttaaagatgttttaataaagtaaaattgtcagatgttacagagaggcagaaagaacaaccagattaggaaaatgtacaaattcatatgtgtcctggagttgaatggacattaaatgataagcgttggatgacttgtggtgaccatatcttttaaccctgtctactgagttatcaacactattctactggttaactagagatgctacctgcaggcatccactgtctggtccaaaggcatgtgccactatgaccacagctgtggtctgtgtagctgctgcggcagcgatgtgtgtgtctggcgagggctagggtttaatccttggattctgcttctcactccatgagcaggggctaggagcgatcccgaactgcagcctcaaccctgggagggatggagacctgtgtcattcaacagcagtgaccccttctggccaatttaaggagaagcattgaggggccctgaaaggagtcacttccagtcctcctcagaggatgtgatggtggtaggagagccaactctgatgggaggtgagtttggggacgaggacgaaaggctaatcactagattagaaaacacgcaatatgatgcggccaacggcatggacgacgaggaggacttcaacaattcacccgcgctggggaacaacagcccgtggaacagtaaacctcccgccactcaagagaccaaatcagaaaaccccccaccccaggcttcccaataagatgatcggcaccagaatccactgtcaataggcccgtgggtgatcattacaattgcaaatctttacttacaggagaggaaacagaagagataaaaacttttccatgcaaatatctatttctaaaccacaatgatctgattttctttcttctttctttttttctaattgagaggattattcccagtaagcttccatgaccctttcttggaggccttcacaggtaatacagatactggcactgattgtaattaaaatgagagaaaactctagcgcatcttctggcacggttttaacaacgtgtttgtgttgaatttcctttttatgcatcaaacgaaggccatattgtccataaatgctcagtgctcaggatctcattaatatgccgaacctaactacagatgactttttaatattgtaaaatattttctgctttttgacttgcatctgagagtttcttgtttcagtaaaaaaagaaaagacaaaaaaatcagctttggaaagtaatttaaatgtaccttattttttttttctttatgttttctttcattgggcaacagctaagagggcccagcaaggtaatttatggttgagctgatgtcaattggttcttgtcttgagtcgactcaatttagcccaagtgctgaaacaagaaatgtcatttttttcatcaaagacaccagggcagatttttaagtaaagaaagacaattggacccttaagaatttatgcatttgtaaagttgctgttgatccaaatattttcaagccatgtaatccattggttttgtgggcagtttaataaacctgaacctttgtgtgttttctaattgtacctgagttgaccatcctttctttttatagtatatttcttgtatgatattttgtaaagctctcacctggttcttttatggggacttttcgtttttgggcaactccagtgtatttatgtgaaactttataagagaattaatttttccatttgcatattaatatgttcctccacacatgtaaaggcacagtggctccgtgtgttaaaaaacagctgtattttatgtatgctttactgataagtgtgccaataataaactgtgttaatgacc

SEQ ID NO: 8299 - DNA, 598 bp, Homo sapiens
atgctggaggttcgctagccgaagcggctgcatctggcgccgcgtctgccccgcgtgctcggagcggattctgcccgccgtccccggagccctcggcgccccgctgagcccgcgatcacttcctccctgtgaccaaccggcgctgcaggttagagcctggcaatgccgtttgggtgtgtgactctgggcgacaagaagaactataaccagccatcggaggtgactgacagatatgatttgggacaggtcatcaagacgtgagtgccgggcctgtcagtgaggagttttgtgaaatcttccgggccaaggacaagacgacaggcaagctgcacacctgcaagaagttccagaagcgggacggccgcaaggtgcggaaagctgccaagaacgagataggcatcctcaagatggtgaagcatcccaacatcctacagctggtggatgtgtttgtgacccgcaaggagtactttatcttcctggagctggccacggggagggaggtgtttgactggatcctggaccagggctactactcggagcgagacacaagcaacgtggtacggcaagtcctggaggccgtggcctatttgcactcact

SEQ ID NO: 8300 - DNA, 2480 bp, Homo sapiens
agtttctcctttgttttacgtttgggaggaggtggcattggaaatagcagagtgcttcgcggtaacagggacaaatgtactgaggctggagcctgtgtgaacagaacagaagaggccttcactctagtagtgctcacagtccagcaggtgtttgctgaagacagcttactcagatcactactgcctggaggtggttgatatatcctggtgtaaaccttcaagaagggcacaggcaggaaaacatgagccagcaactgaagaaacgggcaaagacaagacaccagaaaggcctgggtggaagagcccccagtggggctaagcccaggcaaggcaagtcaagccaagacctgcaggcggaaatagaacctgtcagcgcggtgtgggccttatgtgatggctatgtgtgctatgagcctggccctcaggctctcggaggggatgatttctcagactgttacatagaatgcgtcataaggggtgagttttctcaacccatcctggaagaggactcactttttgagtccttggaatacctaaagaaaggatcagaacaacagctttctcaaaaggttttcgaagcaagctcccttgaatgttctttggaatacatgaaaaaaggggtaaagaaagagcttccacaaaagatagttggagagaattcgcttgagtattctgagtacatgacaggcaagaagcttccgcctggaggaatacctggcattgacctatcagatcctaaacagctcgcagaatttgctagaaagaagccccccataaataaagaatatgacagtctgagcgcaatcgcttgtcctcagagtggatgcactaggaagttgaggaatagagctgccctgagaaagcatctcctcattcatggtccccgagaccacgtctgtgcggaatgtgggaaagcgttcgttgagagctcaaaactaaagagacatttcctggttcatactggagagaagccgtttcggtgcacttttgaagggtgcggaaagcgcttctctctggactttaatttgcgtacgcacgtgcgcatccacacgggggagaaacgtttcgtgtgtccctttcaaggctgcaacaggaggtttattcagtcaaataacctgaaagcccacatcctaacgcatgcaaatacgaacaagaatgaacaagagggaaagtagtcctccaacaggatgaagcagattaacagaagagtgatcagtgacaaacatgcctcattgattattgtttctaggaaggaatttctaaatcaatattgcaaccccaaaagcggttataatttggtgttactaagatgctcctacactttgtgataccgttttaaggacatggtgcatttttttttcttttatttgttttatttagaactttttttatttgttttatttagaactttgtgtgttcttaaagtgtgcttccaacaggaaggtcagtgataaattttcaaaagcataaccttcaatatattatctgttggattattggatataagacttattttcatgtactataaatatgaaaataactttgatttttaattgtgtagtttccatttcttagcttttgccttttaaatttatacttcagccaggcatagtgactgatgcctgtaatcccaacactttgttgggaggccaaagcaggaggatagcttgaggccaggagttccagaccagcctgggcaacatagtgagatcctgtctctacaaaaaaatttgtttttatttgtatttatatatttttatttttgtttttgttggtaggcgtctcgctctgtcacccaggctggagtctagtgtcgtgatcttggctcactgcaacctccacctcccgggttcaagtgattctctggcctcagcctcccaagtagctgggactacaggtgtgtgtcaccacgcccggctaatttttgtatttttagtagagatggggtttcaccatgttggccaggctagtctcaaactcctgacctccagtgatctgcccacctcggcctcccaaagtgctgggattacaggtgtgagccactgtgcctggccccccacaacatgtttaaacttagctaggcctggttgcatacgcctgtgttcccagctactcaggaggctgaagcaggaggatagcttgagcccaggagtttgaggctacagtgagctgtgattgcaccactgtactccagactggataacagcaagagcccatcttttaaaaaaagtaaaaattaaaaatatacttcatggttcatgtcatagccctagagaatgaaaaatttgcagtagatagtcaataaatgaatcagtagttaaatattccttaaagtcaactgtatttcattgtgatttttgttttctttttatcattgtatcaaactatatggaaatcatatggttagatgtgattatttgataatgttagtccatttgaatccattttagatatttcacaattaaagaatatgaaacttc

SEQ ID NO: 8301 - DNA, 585 bp, Homo sapiens
ggagcggctgcacggacaagagcggaggcctggctatacctgctggaatggataaagtgagctttaaaagttgatcagaccgaagagattgaagtgagagaaccacaggaacaaagaaggggaaactgaagcagaaagaggttacttaatgggctcaaggtcacctacctgacctaccagcagctcaatggccttcccaaagaagaaacttcagggtcttgtggctgcaaccatcacgccaatgactgagaatggagaaatcaacttttcagtaattggtcagtatgtggattatcttgtgaaagaacagggagtgaagaacatttttgtgaatggcacaacaggagaaggcctgtccctgagcgtctcagagcgtcgccaggttgcagaggagtgggtgacaaaagggaaggacaagctggatcaggtgataattcacgtaggagcactgagcttgaaggagtcacaggaactggcccaacatgcagcagaaataggagctgatggcatcgctgtcattgcaccgttcttcctcaagccatggaccaaagatatcctgattaatttcctaaaggaagtggctgc

SEQ ID NO: 8302 - DNA, 338 bp, Homo sapiens
ggcctcccctcattaagagtggttactgcgtgaagcaagggaatgtgcggaagagctggaaacgtcgcttctttgcacttgatgactttaccatctgctacttcaagtgtgagcaggaccgagaaccactgcgcaccatatttcttaaggatgttctgaagacccatgaatgtctggtcaagtctggtgatctcttaatgagggacaacctgtttgaaataataacaagctccaggaccttctacgtacaggtacaatgtacaatctgaagccatatcaagaaatttttatactcttacattaaaatccattggtcaattttgcactttgaatagata

SEQ ID NO: 8303 - DNA, 546 bp, Homo sapiens
agatgcacaggaggagaagcaggagctgtcgggaagatcagaagccagtcatggatgaccagcgcgaccttatctccaacaatgagcaactgcccatgctgggccggcgccctggggccccggagagcccatgcagaatgccaccaagtatggcaacatgacagaggaccatgtgatgcacctgctccagcactgtgcaaggctctgggcccacaatggggagcaattggacccagctcctgaagccatggggatcccaggctagtgtgggagacagacaagtgaccaggtgatgacagaagtgcagggggctttgtgaagaaagaggcagaggactcaacctagctgggggcagtcaaggttgggtcctcacctgctggagcaggtaagacctgaaagctgagcagccatccacagggaggacactggggcttgttggtagagctggcctggaatctggaactcgactcgcaacgctgcagtctcgtagctgaacagctggactacccttacccgtaccctcccctcccctcccatcatggctga

SEQ ID NO: 8304 - DNA, 680 bp, Homo sapiens
ttacttttttgcagttacacccccagattaccagcctcccggttttaaggatggtgattgtgaaggagttatatttgaaggggaacctatgtatttaaatgtgggagaagtctcaacaccttttcacatcttcaaagtaaaagtgaccactgagagagaacgaatggaaaatattgactcaactatactatcaccaaaacaaataaaaacaccatttcaaaaaatcctgagggacaaagatgtagaagatgaacaggagcattatacaagtgatgatttggacattgaaactaaaatggaagaacaggaaaaaaaccctgcatcttctgaacttgaagaaccaagtttagtttgtgaggaagatgaaattatgaggtctaaagaaagtccagatctttctatttctcattctcaggttgagcagttagtcaataaaacatctgaacttgatatgtctgaaagcaaaacaagaagtggaaaagtctttcagaataaaatggtcctccatcactttgattcttctagtcaagagtcagtgccaaaaaggagaaagtttagtgaaccaaaggaacatatataaaaattatttttgttctgcaggcttgcagagttcttctcaccatttaaactgaaggaccctatattatatttccctaactctgaagatgtatatgtagttt

SEQ ID NO: 8305 - DNA, 575 bp, Homo sapiens
gtgcagccaggggcttccggccgcggccctggcgcgtggtctgcgcgcgcccggccgtgcgtgcggatgcggggaggctgcgtgtgtgcgcagggagagaacgccggccaccttcccgcttccgagctgggtgcgcgccgagcacaggagattgcctgcgtttaggaggtggctgcgttgtgggaaaagctatcaaggaagaaattgccaaaccatgtctttttttctgttttcagagtagttcacaacagatctgagtgttttaattaagcatggaatacagaaaacaacaaaaaacttaagctttaatttcatctggaattccacagagacaaggccactttatgtttcccaggctggactggaacccctgggctcaaatgatcctcctacctaagcctgcagagtagcgaggacttcagttttcttagctccctggacccggttgacctgttggctcttcccgctggctgctctatcacgtggtgctctccgactactcaccccgagtgtaaagtcttgctgctctgttgcccaggctggagtacagtggcaggatctcagctcactgcaat

SEQ ID NO: 8306 - DNA, 1346 bp, Homo sapiens
atcgtactgagaagcactccacaatgccagactcacctgtggatgtgaagacgcaatctaggctgactcctccaacaatgccacctcccccaactactcaaggagctccaagaaccagttcatttacaccgacaacgttaactaatggcacgagccattctcctacagccttgaatggcgccccctcaccacccaatggcttcagcaatgggccttcctcttcttcctcctcctctctggctaatcaacagctgcccccagcctgtggtgccaggcaactcagcaagctgaaaaggttccttactaccctgcagcagtttggcaatgacatttcacccgagataggagaaagagttcgcaccctcgttctgggactagtgaactccactttgacaattgaagaatttcattccaaactgcaagaagctactaacttcccactgagaccttttgtcatcccatttttgaaggccaacttgcccctgctgcagcgtgagctcctccactgcgcaagactggccaaacagaaccctgcccagtacctcgcccagcatgaacagctgcttctggatgccagcaccacctcacctgttgactcctcagagctgcttctcgatgtgaacgaaaacgggaagaggcgaactccagacaggtgagagggaggaggagcctggatgaaccatgacctttttcccatacctgtggcatgaggaaacatttcatgtcacaattaaaccgctggcctatgtcattcttgcacaatagcaataagccattgtggccatcttgagaatctggctctggcctgggattttacagagttttgaatctctggcctgggacagtttggcttttgtgtaggttaatcttttctgcttgtagtattaaagcgaaatggtgaagacgaatgatttttctgatttgccaagtaccactgatggctcttagatgcacatcaatattaaaattctcattcattatgtaatttaacccaaccacatattttacttcaatattctgaaattggctgttcctagtttccttaaaatgtgatggtttggaagcttgtctgtatgtatttcttaacacagtacagtagttatttgttttggtttgtatatgaactaagagaaaacttctgggacactagatgaactgagtgaagataagagttatacagtagagacaatagatggtatttttgctgaaaattttacttgttagatactgttctatcagatactgtgctctcataactaagaattctaagaaatgtaaaataaaaccacttctccattaaaccctacagagtaattgttgaataaagcatacacatgaaatttccc

SEQ ID NO: 8307 - DNA, 564 bp, Homo sapiens
acgggcctgtgctaatgggatccacatgaataggggctgcccctcggctgcagtgggctacccgggcatgaagccccagcagcactgcccaggcgagcttcagcagcagagtgacaccagcagcctgctgaggcagacccatcttggcaatggatatgacccccaaagtcaccagatcacgagctgctgcagccccatcacgactgctgccaacgccaggagcagcctgctgctgtgggccagtcaggggtgaggagagcccccgacagtcctgtcctggaagcagtgtgggaccctccatttcactcagggcccccatgctgcttgggccttgtgccagttgaagaggtggacagtcctgactcctgccaagtgagtggaggagactggtgtccccagcaccccgtaggggcctacgtaggacaggaacctggaatgcagctctccccggggccactggtgcgtgtgtcttttgaaacaccacctctcacaatttaggcagaagctgatatcccagaaagactatatattgttttttttttaaaaaaaaaaagaagaaaaaag

SEQ ID NO: 8308 - DNA, 613 bp, Homo sapiens
aaacgtggaaaactgagtggacatggtgttcaggagattgaggctcagctaaattccagcttatttacctgcagttgcttacaaagtgtttggacataattgtgtaaagctagggttttttttctggtttttaaaacaggtaaaggatgtcacagcaccacttaataacatttcttctgaagtccagattttaacatctgatgccaataaattaactgctgagaacatcactagtgctacgcgagtggttggacagatattcaacacttccagaaatgcttcacctgaggcaaagaaagttgccatagtaacagtgagtcaactcctagatgccagtgaagatgcttttcaaagagttgctgctactgctaatgatgatgcccttacaacgcttattgagcaaatggagacttattccttgtctttgggtaatcaatcagtggtggaacctaacatagcaatacagtcagcaaatttctcttcagaaaatgcggtggggccttcaaatgttcgcttctctgtgcagaaaggagctagcagttctctagtttctagttcaacatttatacatacaaatgtggatggccttaacccagatgcacagactgagctt

SEQ ID NO: 8309 - DNA, 566 bp, Homo sapiens
gtggagctgccagagtaaagcaaagagaaaggaagcaggcccgttggaagtggttgtgacaaccccagcaatgtggagaagcctggggcttgccctggctctctgtctcctcccatcgggaggaacagagagccaggaccaaagctccttatgtaagcaacccccagcctggagcataagagatcaagatccaatgctaaactccaatggttcagtgactgtggttgctcttcttcaagccagctgatacctgtgcatactgcaggcatctaatcatccagtggtatctgtgcaggattggttccaggatccccctcatacaccaaaatccatggagctcaaatcctttatataaaatgattagaagacctgcgagtaaaactgaagaaagaaggatattctaatatttcttatattgttgttaatcatcaaggaatctcttctcgattaaaatacacacatcttaagaataaggtttcagagcatattcctgtttatcaacaagaagaaaaccaaacagatgtctggactcttttaaatggaagcaaagatgacttcctcatata

SEQ ID NO: 8310 - DNA, 636 bp, Homo sapiens
aggaagagagatgtagaggcaagttgcttttaaccaggattggagttttgtcagctttataaaaagctcaatactcatgtggccttagttggtatggaaatctggactgacaaggataagataaagataaccccaaatgcaagcttcaccttggagaatttttctaaatggagggggagtgttctctcaagaagaaagcgtcatgatattgctcagttaatcacagcaacagaacttgctggaacgactgtgggtcttgcatttatgtctacaatgtgttctccttattctgttggcgttgttcaggaccacagcgataatcttcttagagttgcagggacaatggcacatgaaatgggccacaactttggaatgtttcatgacgactattcttgcaagtgtccttctacaatatgtgtgatggacaaagcactgagcttctatatacccacagacttcagttcctgcagccgtctcagctatgacaagttttttgaagataaattatcaaattgcctctttaatgctccattgcctacagatatcatatccactccaatttgtgggaaccagttggtggaaatgggagaggactgtgattgtgggacatctgaggaatgtaccaatatttgctgt

SEQ ID NO: 8311 - DNA, 365 bp, Homo sapiens
atcctcttatatataaaatttattaggcatctgatttttaaaaattacatttcactatatcgttatagctgccaatggctctaatgaagatagaggagaggttgcagatgaagataagagaattataactgatgatgagataataagcttatccattgaattctttgaccagaacagattggatcggaaagtaaacaaagacaaagagaaatctaaggaggaggtgaatgataaaagatacttacgatgcccagcagcaatgactgtgatgcacttaagaaagtttctcagaagtaaaatggacatacctaatactttccagattgatgtcatgtatgaggaggaacctttaaaggattattata

SEQ ID NO: 8312 - DNA, 582 bp, Homo sapiens
taacaatcctaggaggtataaatccccattttattgatgagggaattgaggcttggagaggttcagcaacttgcccaaggttacataattcatcagtagcaaaggcaggattcaaacccaggtggtctggctccaatagctgtacctgagggtgggaagaagacagctcagatcacccactgagtttgtccctctactctgacaaaccccatgagctgcagggcagagggtacagttctgatccccagtggtccccgttactggatccccagactcctgaaccaacttacgctgtcctctttcctgacaggattgtcctggcacgatgacctcacccagtatgtgatctctcaggagatggagcgcatccccaggcttcgccccccagagccccgtccaagggacaggtctggcttggcacccaagagacctggtcctgctggagagctgcttttacaggacatccccactggctccgcccctgctgcccagcatcggcttccacaaccaccagtgggcaaaggtggagctggggccagctcctctctgtcccctctgcaggctgagctgctcccgcctctc

SEQ ID NO: 8313 - DNA, 1145 bp, Homo sapiens
gactgcatgaagtgcattggagagaacagaagtttctgctgctaaaaaccattaatatattatttttatttttattatgacttagtataactaggtaccacagtaaatcgatgatcataaaacttttcattgtatgtagtacaaaatcagaattgacacatatttaaaaatcttcctatgccttctcagagtctggtgactttttaaaatatgttgaagaagattctttgggctataaagatgaagagtctacttcttctggtgctgatttcaatctgctgggctgatcatctttcagacaactatactctggatcatgacagagctattcacatccaagcagaaaatggcccccatctacttgtggaagcagagcaagccaaggtgttttcacacagaggtggcaatgttacactgccatgtaaattttatcgagaccctacagcatttggctcaggaatccataaaatccgaattaagtggaccaagctaacttcggattacctcaaggaagtggatgtttttgtttccatgggataccacaaaaaaacctatggaggctaccagggtagagtgtttctgaagggaggcagtgatagtgatgcttctctggtcatcacagacctcactctggaagattatgggagatataagtgtgaggtgattgaaggattagaagatgatactgttgtggtagcactggacttacaaggtatgtatctataagtcatgttcaacgtataaatggtcattaatagttgctttttttttcatgaagagtaatgtctagtggttaacacagtaataaagtgaaaaaccaaagtccttgcctggcatcttattcttttgtattctacagtctgcctatgattccagctttcatgtttgaaatgcatacacaatgcttatgtgcaaaattgaagctatttgtaactaggagaaacgtgcagtggaactgaattaacagttttcagatactgccttatgttattcaaaatcatctaaattccattatatggttattgagaaattcagactgtgtactttttttattttgtttctaaaattatctcagtttcaaaataatggcatgttttgtaaaggacatctgctaactaaaatatatgtaattgtattctgtaaaa

SEQ ID NO: 8314 - DNA, 2371 bp, Homo sapiens
aatcctaaccctctctcccagaacgtgtctctgctgcaaggcaccgggccctttcgctctgcagaactgcacttgcaagaccattatcaactcctaatcccagctcagaaagggagcctctgcgactcattcatcgccctccaggactgactgcattgcacagatgatggatatttacgtatgtttgaaacgaccatcctggatggtggacaataaaagaatgaggactgcttcaaatttccagtggctgttatcaacatttattcttctatatctaatgaatcaagtaaatagccagaaaaagggggctcctcatgatttgaagtgtgtaactaacaatttgcaagtgtggaactgttcttggaaagcaccctctggaacaggccgtggtactgattatgaagtttgcattgaaaacaggtcccgttcttgttatcagttggagaaaaccagtattaaaattccagctctttcacatggtgattatgaaataacaataaattctctacatgattttggaagttctacaagtaaattcacactaaatgaacaaaacgtttccttaattccagatactccagagatcttgaatttgtctgctgatttctcaacctctacattatacctaaagtggaacgacaggggttcagtttttccacaccgctcaaatgttatctgggaaattaaagttctacgtaaagagagtatggagctcgtaaaattagtgacccacaacacaactctgaatggcaaagatacacttcatcactggagttgggcctcagatatgcccttggaatgtgccattcattttgtggaaattagatgctacattgacaatcttcatttttctggtctcgaagagtggagtgactggagccctgtgaagaacatttcttggatacctgattctcagactaaggtttttcctcaagataaagtgatacttgtaggctcagacataacattttgttgtgtgagtcaagaaaaagtgttatcagcactgattggccatacaaactgccccttgatccatcttgatggggaaaatgttgcaatcaagattcgtaatatttctgtttctgcaagtagtggaacaaatgtagtttttacaaccgaagataacatatttggaaccgttatttttgctggatatccaccagatactcctcaacaactgaattgtgagacacatgatttaaaagaaattatatgtagttggaatccaggaagggtgacagcgttggtgggcccacgtgctacaagctacactttagttgaaagtttttcaggaaaatatgttagacttaaaagagctgaagcacctacaaacgaaagctatcaattattatttcaaatgcttccaaatcaagaaatatataattttactttgaatgctcacaatccgctgggtcgatcacaatcaacaattttagttaatataactgaaaaagtttatccccatactcctacttcattcaaagtgaaggatattaattcaacagctgttaaactttcttggcatttaccaggcaactttgcaaagattaattttttatgtgaaattgaaattaagaaatctaattcagtacaagagcagcggaatgtcacaatcaaaggagtagaaaattcaagttatcttgttgctctggacaagttaaatccatacactctatatacttttcggattcgttgttctactgaaactttctggaaatggagcaaatggagcaataaaaaacaacatttaacaacagaagccagtccttcaaaggggcctgatacttggagagagtggagttctgatggaaaaaatttaataatctattggaagcctttacccattaatgaagctaatggaaaaatactttcctacaatgtatcgtgttcatcagatgaggaaacacagtccctttctgaaatccctgatcctcagcacaaagcagagatacgacttgataagaatgactacatcatcagcgtagtggctaaaaattctgtgggctcatcaccaccttccaaaatagcgagtatggaaattccaaatgatgatctcaaaatagaacaagttgttgggatgggaaaggggattctcctcacctggcattacgaccccaacatgacttgcgactacgtcattaagtggtgtaactcgtctcggtcggaaccatgccttatggactggagaaaagttccctcaaacagcactgaaactgtaatagaatctgccaggtgcggtggcgggcacctgtaatcccagctacttgggaggctgaggcaggagaatcacttgaacccgggaggcggaagttgcagtgagctaagatcatgaccctgcactccagcctgggcgacaaagcaagactccgtc

SEQ ID NO: 8315 - DNA, 1068 bp, Homo sapiens; identical to SEQ ID NO: 3791

SEQ ID NO: 8316 - DNA, 1299 bp, Homo sapiens
ctcgggcggtcacctgggcacgggcgctgcaggtgtcggggcctcaaccttgcggagccgacagccatcgatcctcgggtggcctcgaggtggtggcagggccgccccctgcagtccggagacgaacgcacggaccgggcctccggaggcaggttcggctggaaggaaccgctctcgcttcgtcctacacttgcgcaaatgtctccggcttgctccacttatcgggctcaccaaatacagctgcagtatgaattccatcttctacacaacagtaaaccagaatgttcatgttcacagcgttcatctcccatcctgttgtctaacgcacatggtttttttaaacttttctaagattgcatgagattctgcaacacaactgattataaaaacacttgaagtttttacctttttttttactttccaactctcgtgaatgtacagaggactttccagaagctacatgatgtgtgatatttcagctgatgaaatgtagatgtataggtaatcggtcagagtggtgggagaaactgttgggaaaggagcaggccttctgaaaggtcggaaggcttcaggggagaataagctgaacgcagctgttctctgaccttgaggcagagggcaaggagtaggtacaaggacgtgtaggagaatttatcttaaataggcttgttcacttgtgttgtccagaaacgacttttgatcatcagcgcgcatgactgctccctgaaaggaagaacaataatgttaattacccgcagactgtgtttgctccaggctttcggcattatgtctgtactgaataaaagcaagcagctccagctgttcgaggctgctctcttcttcagccattagtgccgggcagcccactagctgctgttacactgcatatctgtgtctgagtactcctttcttcagttgcttggccagggtctgtgggacagacccagcagctggtgccctgtgtgaggaacgctgcaatggatcgcgacggaaccctcgaaaacgaagagcttactcacatagcatattggtatatcaaaatgaaatgcaaggaaccaaaaataacataattgaaggcagtaaaagtgaaattaaataggaagatcatcagtcaaggaagacccactggagaggacagaaaatgaagcagtgttttatcatgtgtatttcagcaggtcttcttgaaatttaactaaaaatatgactgctctctcttcagagaactgctcttttcagtaccagttacgtcaaacaaaccagcccctagatgttaactatctgctattcttgatcatactt

SEQ ID NO: 8317 - DNA, 2112 bp, Homo sapiens
aggctgcccggaggaggcagcggcggcggcagcgcgtcctcggtccccaggaccacggcttctttcctgccagatctatccatctggccatccatccgtgggggtctgcaatggccacctttagccgccaggaatttttccagcagctactgcaaggctgtctcctgcctactgcccagcagggccttgaccagatctggctgctccttgccatctgcctcgcctgccgcctcctctggaggctcgctgcacatggtttgggtcgtgctgctcagcctcctgtgctacctcgtgctgttcctctgccgacattcctcccatcgaggcgtcttcctatccgtcaccatcctcatctacctactcatgggtgagatgcacatggtagacaccgtgacatggcacaagatgcgaggtaggtagccctgcccctctcacctgcccaacccccctgccccactcctcgtctcctaactgcccccaccctgtgcctttcctctcctgcttttctccctcacctgcccaccccactggacgtgcagacctcacattactcttgggtccgtgtctctttccaccgtgcattttcccgaagtctgtctgtctcgtgtcatgtatgtgcctgactctctggagtaagggcatctatctgtcctgggcttccttgcccacctgcctatctgtcccatgcccacctatccatccttgtgcccgcttttcctaccacatctcacctggtgcacctcctccttgccatgctgatctgctctctgcccatccacttgaccatgggcaccacacataggggcacagatgattgtggccatgaaggcagtgtctctgggcttcgacctggaccggggcgaggtgggtacggtgccctcgccagtggagttcatgggctacctctacttcgtgggcaccatcgtcttcgggccctggatatccttccacagctacctacaagctgtccaaggccgcccactgagctgccggtggctgcagaaggtggcccggagcctggcactggccctgctgtgccttgtgctgtccacttgcgtgggcccctacctcttcccgtacttcatccccctcaacggtgaccgcctccttcgcaagtggctgcgagcctacgagagtgctgtctccttccacttcagcaactattttgtgggctttctttccgaggccacggccacgttggcgggggctggctttaccgaggagaaggatcacctggaatgggacctgacggtgtccaagccactgaatgtggagctgcctcggtcaatggtggaagttgtcacaagctggaacctgcccatgtcttattggctaaataactatgttttcaagaatgctctccgcctggggaccttctcggctgtgctggtcacctatgcagccagcgccctcctacatggcttcagtttccacctggctgcggtcctgctgtccctggcttttatcacttacgtggagcatgtcctccggaagcgcctggctcggatcctcagtgcctgtgtcttgtcaaagcggtgcccgccagactgttcgcaccagcatcgcttgggcctgggggtgcgagccttaaacttgctctttggagctctggccatcttccacctggcctacctgggctccctgtttgatgtcgatgtggatgacaccacagaggagcagggctacggcatggcatacactgtccacaagtggtcagagctcagctgggccagtcactgggtcacttttggatgctggatcttctaccgtctcataggctgaggcacatctgtggaccctcataaccctcttaagacccctctcagggtgccactgatgggggatgagggaaggccctctctctactccttgaccccctccatccttgacccccaacacctcaacacacacacacacacacacacacaaaatcacaccattttcatgcctgtcaatccccaccccaccacaaggcaggaagggggtggtgcctgctggggcctagagggggatgcttggggaaacagagaaggggagatccagggcctccccgccttccttcttcctttttatatacaatttgttattgtcaaataaaagtaggaaatattc

SEQ ID NO: 8318 - DNA, 571 bp, Homo sapiens
gatctgctccagccccatcctctaacggggagagggccagagctggcctcttttttgaagtctgcggtctggggtggagaaggcagtaacatagctcctatctggcagtgtggtgggaccagccctcaccttccgcatccggcacaatgagcagaacctgtctttggctgatgtgacccaacaagcaggtaaatatctctgcgacctcaatcccaggcttggccccagccccactcctaagaggatatatccaggcctgttgctgatgcccccttgaaatgttcccagcccacatgggccctgcctgctgcttggcagagcaagacagaggatggagaccacatggggctggagcaagcctgacctttgtcctccctgcagggctggtgaagtctgaactggaagcacagacagggctccaaatcttgcagacaggagtgggacagagggaggaggcagctgcagtccttccccaaactgcgcacagcacctcacccatgcgctcagtgctgctcactctggtggccctggcaggtgtggctgggctgctggtggctctggctgtggctct

SEQ ID NO: 8319 - DNA, 563 bp, Homo sapiens
gaacatggacgttttgttctcatttcgtgatggagactgcagtaaaggattcttcctggtctctctattggtggaaatagcagctgcttctgcaatcaaagtaattcctactgtattcaaggcaatgcaaatgcaagaacgggacactttgctaaaggcgctgttggaaatagcttcttgcttggagaaagcccttcaagtgtttcaccaaatccacggcaagtgttgtgtgcagtgcaatagtctaggctgacaagtcaaatgttccaggtgtagaatagttgaaaaaagggaagcaaaaagcaactatcacttagtatgttttcactttaggtattttatcttactaaaccattccactttctatgtggtaggtttcattatctccattttataagtaaagtcatctaaattcagaaagacagggtaaatgacttcagattccacaggcggtgaagccagagttccaagctgggtctatttaacactaaggaacttccttgcctcccgctaaaaaccttagagaaactttccacatgggagggtggttttaagtcccgaaa

SEQ ID NO: 8320 - DNA, 769 bp, Homo sapiens
attctgctcctagaggcccagcctctgtgactccgttatctgcaggtattgggagatgcacagctaagatgccaggaccacctggaagcctagaaatggtattgctgtctctaagcctcacctgataacctgtttggagcaaggaaaagagccctggaataggaagagacaggagatggtagccaaacccccagttatatattctcatttcactgaagacctttggccagagcatagcataaaagattcttttcaaaaagtgatactgagaggatatggaaaatgtggacatgagaatttacaattaagaataagttgtaaaagtgtggatgagtctaaggtgttcaaagaaggttataatgaacttaaccaatgtttgagaactacccagagcaaaatatttcaatgtgataaatacgtgaaagtctttcataaattttcaaattcaaacagtcataagaaaagaaatactggaaagaaggttttcaaatgtaaagaatgtggcaaatcattttgcatgctttcacatctaacacaacatataagaattcacactagagagaattcttacaaatgtgaggaatgtggcaaagttcttaactggttctcagagcttattaaacataagggaattcatatgggagagaaaccctacaaatgtgaggaatgtggcaaagcctttaaccaatcctcaacccttattaaacataagaaaattcatattgaagagaaacccttcaaatgtgaagaatgtggcaaagcctttagt

SEQ ID NO: 8321 - DNA, 3292 bp, Homo sapiens
aatgcgttactgtgtggactgagttcccatgactcgggctccccaggacaatgtctctttcttcaccaagctgatggtaaatatctggttagcttcatctatttaaaaccagccaagcaggaatcctagtgctggagagaggattctttttttttttgtttggtgaagtagagaaataaagtctccccgctgaactactatgaggtcagaagccttgctgctatatttcacactgctacactttgctggggctggtttcccagaagattctgagccaatcagtatttcgcatggcaactatacaaaacagtatccggtgtttgtgggccacaagccaggacggaacaccacacagaggcacaggctggacatccagatgattatgatcatgaacggaaccctctacattgctgctagggaccatatttatactgttgatatagacacatcacacacggaagaaatttattgtagcaaaaaactgacatggaaatctagacaggccgatgtagacacatgcagaatgaagggaaaacataaggatgagtgccacaactttattaaagttcttctaaagaaaaacgatgatgcattgtttgtctgtggaactaatgccttcaacccttcctgcagaaactataagatggatacattggaaccattcggggatgaattcagcggaatggccagatgcccatatgatgccaaacatgccaacgttgcactgtttgcagatggaaaactatactcagccacagtgactgacttccttgccattgacgcagtcatttaccggagtcttggagaaagccctaccctgcggaccgtcaagcacgattcaaaatggttgaaagaaccatactttgttcaagccgtggattacggagattatatctacttcttcttcagggaaatagcagtggagtataacaccatgggaaaggtagttttcccaagagtggctcaggtttgtaagaatgatatgggaggatctcaaagagtcctggagaaacagtggacgtcgttcctgaaggcgcgcttgaactgctcagttcctggagactctcatttttatttcaacattctccaggcagttacagatgtgattcgtatcaacgggcgtgatgttgtcctggcaacgttttctacaccttataacagcatccctgggtctgcagtctgtgcctatgacatgcttgacattgccagtgtttttactgggagattcaaggaacagaagtctcctgattccacctggacaccagttcctgatgaacgagttcctaagcccaggccaggttgctgtgctggctcatcctccttagaaagatatgcaacctccaatgagttccctgatgataccctgaacttcatcaagacgcacccgctcatggatgaggcagtgccctccatcttcaacaggccatggttcctgagaacaatggtcagataccgccttaccaaaattgcagtggacacagctgctgggccatatcagaatcacactgtggtttttctgggatcagagaagggaatcatcttgaagtttttggccagaataggaaatagtggttttctaaatgacagccttttcctggaggagatgagtgtttacaactctgaaaaatgcagctatgatggagtcgaagacaaaaggatcatgggcatgcagctggacagagcaagcagctctctgtatgttgcgttctctacctgtgtgataaaggttccccttggccggtgtgaacgatatgggaagtgtaaaaaaacctgtattgcctccagagacccatattgtggatggataaaggaaggtggtgcctgcagccatttatcacccaacagcagactgacttttgagcaggacatagagcgtggcaatacagatggtctgggggactgtcacaattcctttgtggcactgaatgggcattccagttccctcttgcccagcacaaccacatcagattcgacggctcaagaggggtatgagtctaggggaggaatgctggactggaagcatctgcttgactcacctgacagcacagaccctttgggggcagtgtcttcccataatcaccaagacaagaagggagtgattcgggaaagttacctcaaaggccacgaccagctggttcccgtcaccctcttggccattgcagtcatcctggctttcgtcatgggggccgtcttctcgggcatcaccgtctactgcgtctgtgatcatcggcgcaaagacgtggctgtggtgcagcgcaaggagaaggagctcacccactcgcgccggggctccatgagcagcgtcaccaagctcagcggcctctttggggacactcaatccaaagacccaaagccggaggccatcctcacgccactcatgcacaacggcaagctcgccactcccggcaacacggccaagatgctcattaaagcagaccagcaccacctggacctgacggccctccccaccccagagtcaaccccaacgctgcagcagaagcggaagcccagccgcggcagccgcgagtgggagaggaaccagaacctcatcaatgcctgcacaaaggacatgccccccatgggctcccctgtgattcccacggacctgcccctgcgggcctcccccagccacatccccagcgtggtggtcctgcccatcacgcagcagggctaccagcatgagtacgtggaccagcccaaaatgagcgaggtggcccagatggcgctggaggaccaggccgccacactggagtataagaccatcaaggaacatctcagcagcaagagtcccaaccatggggtgaaccttgtggagaacctggacagcctgccccccaaagttccacagcgggaggcctccctgggtcccccgggagcctccctgtctcagaccggtctaagcaagcggctggaaatgcaccactcctcttcctacggggttgactataagaggagctaccccacgaactcgctcacgagaagccaccaggccaccactctcaaaagaaacaacactaactcctccaattcctctcacctctccagaaaccagagctttggcaggggagacaacccgccgcccgccccgcagagggtggactccatccaggtgcacagctcccagccatctggccaggccgtgactgtctcgaggcagcccagcctcaacgcctacaactcactgacaaggtcggggctgaagcgtacgccctcgctaaagccggacgtaccccccaaaccatcctttgctcccctttccacatccatgaagcccaatgatgcgtgtacataa

SEQ ID NO: 8322 - DNA, 1957 bp, Homo sapiens
gcccgggccagggtccacctgtccccgcagcgccggctcgcgccctcctgccgcagccaccgagccgccgtctagcgccccgacctcgccaccatgagagccctgctggcgcgcctgcttctctgcgtcctggtcgtgagcgactccaaaggcagcaatgaacttcatcaagttccatcgaactgtgactgtctaaatggaggaacatgtgtgtccaacaagtacttctccaacattcactggtgcaactgcccaaagaaattcggagggcagcactgtgaaatagataagtcaaaaacctgctatgaggggaatggtcacttttaccgaggaaaggccagcactgacaccatgggccggccctgcctgccctggaactctgccactgtccttcagcaaacgtaccatgcccacagatctgatgctcttcagctgggcctggggaaacataattactgcaggaacccagacaaccggaggcgaccctggtgctatgtgcaggtgggcctaaagctgcttgtccaagagtgcatggtgcatgactgcgcagatggaaaaaagccctcctctcctccagaagaattaaaatttcagtgtggccaaaagactctgaggccccgctttaagattattgggggagaattcaccaccatcgagaaccagccctggtttgcggccatctacaggaggcaccgggggggctctgtcacctacgtgtgtggaggcagcctcatcagcccttgctgggtgatcagcgccacacactgcttcattgattacccaaagaaggaggactacatcgtctacctgggtcgctcaaggcttaactccaacacgcaaggggagatgaagtttgaggtggaaaacctcatcctacacaaggactacagcgctgacacgcttgctcaccacaacgacattgccttgctgaagatccgttccaaggagggcaggtgtgcgcagccatcccggactatacagaccatctgcctgccctcgatgtataacgatccccagtttggcacaagctgtgagatcactggctttggaaaagagaattctaccgactatctctatccggagcagctgaaaatgactgttgtgaagctgatttcccaccgggagtgtcagcagccccactactacggctctgaagtcaccaccaaaatgctgtgtgctgctgacccacagtggaaaacagattcctgccagggagactcagggggacccctcgtctgttccctccaaggccgcatgactttgactggaattgtgagctggggccgtggatgtgccctgaaggacaagccaggcgtctacacgagagtctcacacttcttaccctggatccgcagtcacaccaaggaagagaatggcctggccctctgagggtccccagggaggaaacgggcaccacccgctttcttgctggttgtcatttttgcagtagagtcatctccatcagctcggtttggggagcagagacactaacgacttcagggcagggctctgatattccatgaatgtatcaggaaatatatatgtgtgtgtatgtttgcacacttgtgtgtgggctgtgagtgtaagtgtgagtaagagctggtgtctgattgttaagtctaaatatttccttaaactgtgtggactgtgatgccacacagagtggtctttctggagaggttataggtcactcctggggcctcttgggtcccccacgtgacagtgcctgggaatgtattattctgcagcatgacctgtgaccagcactgtctcagtttcactttcacatagatgtccctttcttggccagttatcccttccttttagcctagttcatccaatcctcactgggtggggtgaggaccactcctgtacactgaatatttatatttcactatttttatttatatttttgtaattttaaataaaagtgatcaataaaatgtgatttttctga

SEQ ID NO: 8323 - DNA, 2924 bp, Homo sapiens
agatgctaatattccacttgtatgaaagatgaaaattcatgtataatattaaattttaaaagttcatcctctattttaaatagaaaatgagaaggcaggccaggcgcggtggctcacgcctgtaatcccagcattttaggaggcccaggcgggtggatcacaaggtcaggagttcaagaccagcctggccagacggtgaaaccctgtctctactaaaaatacaaaaattagccgggcgtggtagcagatgcactgtaatcccagctactcgcgaggctgaggcagagaattgcttgaacccaggaggcagaggttgcagtgagcctagattgcgccactgcactccagtctgggcgacagagtgagactctgtctcaaaaaaaaaaaaaaaaaaagaaaatgagaaggtaaaaatatggcttaatgttgatagaatgtcatatttcttttccacttagattagttttctacagtagctaatttgtctactgatttgcctcataggttaatagtattctaacccatatagagataggtacagagaagtattgaccacattattttcactgcttcacagtaagtgcaggcagtaaaacttgttttagaatgccaaacctcaagcttgagacccagtagatcctgtggcctctcaaactgccttgcttaaaataaaccaagctgagttggcagcctttaatgatgccgtaaccctgtgtttgcttgtctgtctttactgccagatggtgcgctccatgagtacagactcctgtttatcctcagaccctagggccttgtgcacagaagatgcttacctccatctctttaccagccattttctgtggtcccacacgtaccttcaaagtcatatcctaagtgaacacatcctttccttcatctcgcccagccccacatctgctccccttcccctgttcagtcatcccagagaatggccccaacaggaatttgcccaactctctgaagtcgtaccattcctccccagacttcttgactatgcctcagccaccccaggcttctttccattcctcaactgtggcaagtctattctcacatcacagtctttgcatccattccttctctggaatgctcatcctctagatctttacctagctgactccttctcatctttcaggtttcagctctcctcctgagagaggtctcccctaactgtaccaggccaattggttccctttcagtcactctccatgccatttccagctttcttttcttcatatttctgatcactatttacttaagcaatagttaatttgctttgctgtctgtctccatctactagaacataagctccatgcagacagagatataatctgttctgttcaccgccattggcacagcacatggaataatgcctggctatagtcgacgctcataagcatttgctggatgaattacatagatgaatggaatatcatttagtatgttggccatcattaggtcaaaatccacctaactgctcagctagaaattttacactatctctctttttcattatcctgtagcgatacatcattatgttttgtcaatccatttacataagcaactctcaaatcttcccattttctccatccctactgcctttattctaaggatggccatcatcatctcttaattactcagtctcctcaagatgagtctcaaagcctctagtcttaactcccttatcttccttctactcctaccttgcaatctgtttctcatgctgcagtcaaagtgattttctgaaaccacgaatttgatctgatctcaacattctcatgtttaaaatattacaagagctctccacacttaggataaagtcagaatttcatttcatggttaacaaggtctggcctttccagacacatttctttttatccctctttgttaacttacgtatccttgaacgtggcgttctttattgccctaaaccttcacgcctgctatttcctctataggaagtttctctcctccctacatgaacctactccttcctcttgttgactgtttagtccttgcttaaatgtcactttctcagacttttcctaatccctaatctttcttaggcccccctgaagtatgctcccatggtacccaatattttcaacatgtcagactgttttgcaatggcttactttcttgcctgtattctttacaaaactggaagcttaacatgggtatctcatctctgctttgcagcatttagcatgatgctgtcacagagtaggtgctcaacaaatatttcttgaataatgaatgatgagtttgataataaatgaaaaagaatcactatagttgaatattttgcacaccattatctgattcttataaatatagatctctatgttgctttgtgaccaatgacatttgtgttgtgaacacctgcattccttaacagggtattggaactgatgagtttactctgaaccgaataatggtgtccagatcagaaattgaccttttggacattcgaacagagttcaagaagcattatggctattccctatattcagcaattaaatcggatacttctggagactatgaaatcacactcttaaaaatctgtggtggagatgactgaaccaagaagataatctccaaaggtccacgatgggctttcccaacagctccaccttacttcttctcatactatttaagagaacaagcaaatataaacagcaacttgtgttcctaacaggaattttcattgttctataacaacaacaacaaaagcgattattattttagagcatctcatttataatgtagcagctcataaatgaaattgaaaatggtattaaagatctgcaactactatccaacttatatttctgctttcaaagttaagaatctttatagttctactccattaaatataaagcaagataataaaaattgttgcttttgtt

SEQ ID NO: 8324 - DNA, 572 bp, Homo sapiens
tgcgcagggagagaacgccggccaccttcccgcttccgagctgggtgcgcgccgagcacaggagattgcctgcgtttaggaggtggctgcgttgtgggaaaagctatcaaggaagaaattgccaaaccatgtctttttttctgttttcagagtagttcacaacagatctgagtgttttaattaagcatggaatacagaaaacaacaaaaaacttaagctttaatttcatctggaattccacagtcttgctgctctgttgcccaggctggagtacagtggcaggatctcagctcactgcaatctccgtctctcaggtttaagcagttctcctgcctcagcctcccaagtaggtgggactacagaaccttcggctcgcgtgcttctgagctgctgtggatggcctcggctctctggactgtccttccgagtaggatgtcactgagatccctcaaatggagcctcctgctgctgtcactcctgagtttctttgtgatgtggtacctcagccttccccactacaatgtgatagaacgcgtgaactggatgtacttctatgagtatgagccgattta

SEQ ID NO: 8325 - DNA, 2702 bp, Homo sapiens
ctttttgtttatcatggtaaaaatgcatagcataaaatgtattatcttaaccatttttaagtgtacagttctgtagtgttaagtatatttacattgctatgcaacagagctccacaactttttcatgttgcaaaactgaaactctatacatgttaaacaacacctctgccttttctcctctccactgtagacctgaaatctttgtttttcctattgacaagggcttggtccgtctgttggccaggaagtcccgatacttcaggttgtagctccgccctctgccttaatgcctgtccccatgatcagtttccacctccatgtctccccacctctgcctgtcaaccaaaacctcacaaatcctggggttcagagcccccatatccctgccctgcccacattactctgactggacctcactggacagcctcactgagcccaagttctagagcttgcgccgcgtactctttgtctaagcgtctacttcctccttctcagaaggcccacggacagctccaccatgcaggtgtgacctgcagttaccttcaccttctgggtctgtagctcccgggtctgcagcccccaaaccccgcaaaggcaagccctgggtcttctttccctcacgtctcctcagaaattccatgggatttgacttggcccaggagacatgggagatctggctatgagaaaagggactaggactccctgttgcatcatctcctcagtctcgggtgaaaggcagcagagtagaagaaaggcaccagtgaagtttatttggctcacggttctggaggctgggaagtccaagagcatggcattggcatctggcgaggccctcatgctgcattatcccatggaagagcagaagggcaacttccaaacagtttcataatgaggtcctgaaggcccacaatgagtaccggcagaagcacggcgtccccccactgaagctctgcaagaacctcaaccgggaggctcaacagtattctgaggccctggccagcacgaggatcctcaagcacagcccggagtccagccgtggccagtgtggggagaaccttgcatgggcatcctatgatcagacaggaaaggaggtggctgatagatggtacagtgaaatcaagaactataacttccagcagcctggcttcacctcggggactggacacttcacggccatggtatggaagaacaccaagaagatgggcgtggggaaggcgtccgcaagtgacgggtcctcctttgtggtggccagatacttcccagcggggaatgttgtcaatgagggcttcttcgaagaaaacgtcctgccgccgaagaagtaacttgttaaatgtaatgggaaggtggcagacttaagaacgtggatatgaagtgcctagaaccaccacaacctggctgtgcgtctgtccctgtgggtgtatgtgcttgtgtgtgtgatgcatgtgagcgtctctggcacacacacttggacatacagttctgtgtgcgctcattcttattacaggagtgagcaaaggaagcatttaccccgatggttacctagaccacgattatttggattggggggaggggggatccgttttttttttttaattttttgttatttctaagcaaacctcttttgtacttttcttacttctaatatccatccctggactttttgtattccaaatgtttgtgatgctgagaagtgaagttcattttatgtgatcttcatgcgtcgtaatctacttttggtagataattaagattattaaaccctcatttaaatgtgacataaaatacagctttaagcacataaatacaaagcagcttccatcaggaacatggagcaggcagggactccattttacagaattactgagatttctcagttgtaaaacatgatgtcatcctgcatgcctcctggaattctccaatggggtcgccaaacaacaaatggagaaaaaaagttttacttccttgcattcttctacctttaaatagcaaagtaccactaccaccaccacctcttgcccccttccctcttttcttaaacttctggcatttcagagctcagcaggctacccctggtttctggagagttgggctaggcctgaagctccccctcccccacctctgctaggcagcccaggcctggtctgggagacagcccctcaccctgcctgggctcttggccaagcggccttggatggatgaagtcagagaggtggggtgagggtgagcttactcagggcccccagaggaagccctcagcctctgccctccccccacacagggcgggagcccaggcctgttcctggcagctgtggctgcagctgtgctcctgctccctcctggaatgtgcgacaagcccaaatgttccggggaggcggccggggcagggggcttagaagtgctaatatggttctgtgttttgcctgaaacgataccaggttcccctgaatagcaactttacaaggtccatgtgggagggaccaacccagatgccctgctgagtgtccctgaaaccatggcagctccatctgtcaagatggcaggggccggagtgagggggctgctggcttaacagcaggcatctgggcaggccagtcctcaaagcagctcctgaaggtctgtgttgcactgtcaccagtctcaagctatgcctctaatttcaccagggatattgactaagaagacaataaaatctttttctttgt

SEQ ID NO: 8326 - DNA, 989 bp, Homo sapiens
ggtagcaggaattgttcaaagctgccgtcttcggctcttaaaggcagctacagtaactttctgaacagattgggttaaatatttttacagacccattctatgatgataaggcggtaataagttgtgcagtgcaacactccaaagggttccaaatctcacaagcctctttgtatgtgatgctctcgcagtgaagaagattctttgggctataaagatgaagagtctacttcttctggtgctgatttcaatctgctgggctgatcatctttcagacaactatactctggatcatgacagagctattcacatccaagcagaaaatggcccccatctacttgtggaagcagagcaagccaaggtgttttcacacagaggtggcaatgttacactgccatgtaaattttatcgagaccctacagcatttggctcaggaatccataaaatccgaattaagtggaccaagctaacttcggattacctcaaggaagtggatgtttttgtttccatgggataccacaaaaaaacctatggaggctaccagggtagagtgtttctgaagggaggcagtgatagtgatgcttctctggtcatcacagacctcactctggaagattatgggagatataagtgtgaggtgattgaaggattagaagatgatactgttgtggtagcactggacttacaaggtgtggtattcccttactttccacgactggggcgctacaatctcaattttcacgaggcgcagcaggcgtgtctggaccaggatgctgtgatcgcctccttcgaccagctgtacgacgcctggcggggcgggctggactggtgcaatgccggctggctcagtgatggctctgtgcaatatcccatcacaaagcccagagagccctgtggggggcagaacacagtgcccggagtcaggaactacggattttgggataaagataaaagcagatatgatgttttctgttttacatccaatttcaatg

SEQ ID NO: 8327 - DNA, 693 bp, Homo sapiens
gtcggagcccttgcacgcctgctctcttgtagcttctctcagcctagcccagcatcactatggtggacgctttcctgggcacctggaagctagtggacagcaagaatttcgatgactacatgaagtcactcggtgtgggttttgctaccaggcaggtggccagcatgaccaagcctaccacaatcatcgaaaagaatggggacattctcaccctaaaaacacacagcaccttcaagaacacagagatcagctttaagttgggggtggagttcgatgagacaacagcagatgacaggaaggtcaagcacagagccaggatgttcttctgacctcagtatctactccagctccagctgggtgaccctgtgcaagtccattgtgacactggatggagggaaacttgttcacctgcagaaatgggacgggcaagagaccacacttgtgcgggagctaattgatggaaaactcatcctgacactcacccacggcactgcagtttgcactcgcacttatgagaaagaggcatgacctgactgcactgttgctgactactactctgccaatcggctacccctcgactcagcaccacattgcctcatttcttcctctgcattttgtacaaatccacgaattcttctggggtcaggtgccactgaccgggatccagttccagttcccatggtgtatgtggtt

SEQ ID NO: 8328 - DNA, 237 bp, Homo sapiens
ccagccctgaaaattccagctctcgcagcccttgctcccaatccacggccttctggccacaccctctgtagggctccagaactggctcctgctttttcccagggatcagctataccctggactctggggcccactccagagagcgtgggccagcccgaggaggcaagcccggaggagcagccagaggaggcgagtgctgaggaggagcggccggaggaccagcaggaggaggaggcg

SEQ ID NO: 8329 - DNA, 631 bp, Homo sapiens
cagaatgccatcaagtgtgggtggctgaggaagcaaggaggctttgtcaagacttggcatactcgctggtttgtgctcaagggggatcagctctattatttcaaagatgaagatgaaaccaagcccttgggtactatttttctgcctggaaataaagtttctgagcatccctgcaatgaagagaacccagggaagttcctttttgaagtagttccaggtaagatattttcctagtctgattaaattattgtcatcctgtgttggtaaaggtgaagatgggtcagacaggtttcattcttttttgaatcatgactgagaaccttaatttgaggcttggttagtgttgacgcagataatgactgcaggtttatatactagtacaaatgaatgcactcacacacacatactctgaccacataactactggattttcatttgtccatgagactccatagttgaccacaagtcatgatacagtatttgttcaggactattggagatgaatttgattttacagcgctcttgtgatgtgaaatttgacaaggggttataggttgaatgctttgcccagtggaatcactgacatatttcctcacaaaattgtatcttcaaggaggttttgcaaaaaaca

SEQ ID NO: 8330 - DNA, 663 bp, Homo sapiens
gggagaccttattatcttcattttcccaatgagatgagaatcccaagcagcacattcccctggaggagtacgctgcgaacctaaagagcatggtgcagtacctgaagtccgtggacatccctgagaatcgagtcattctcatcacgccgaccccactttgtgaaacagcctgggaagaacagtgcatcatacaaggttgcaaactaaatcgcctgaactctgttgttggtgaatatgccaatgcgtgtttacaagtggcccaagactgtgggactgacgtacttgacctgtggaccctgatgcaggacagccaggacttctcatcttatttatcagatggactacatttgtctccaaaggggaatgaatttttgttctcgcatctctggcctttgatagagaaaaaggtctcttctctacctttgctgcttccttactggcgggatgtagcagaagcaaaacctgaattaagtctgctgggagatggagaccattagccaatcacaggagacccaaatctgcttgttatctacagaactcaaagttgtcaatacgtagaggtacgcttttttcctcaggcttaaacctttgccactgatattaataataaaagtattagatgatttttcagggaagttttatacttaggtccattgtgtttcg

SEQ ID NO: 8331 - DNA, 484 bp, Homo sapiens
ctgaaacctccaatgacagcttgccgaaagatgattcagttgtttctcaacttggcccattccccacgtccaagtccaattggagaacggcttttgactccgtttatatgagcatctttgatagagagcaaaggtttctggcaaggcgggatgcctgccttccacctctaatccagctgtccttgacactccagacagccctttcaaatctgggcaacacttagtcatcttactggtagccaaggaccatttgaagtgagatctaacaatatgatcgtgttgctgcactggattccaacgtatccggaaaaattggtctgcgcgctgtcgtgtattatttctgtaccactctcattgctgttattctaggtattgtgctggtggtgagcatcaagcctggtgtcacccagaaagtgggtgaaattgcgaggacaggcagcacccctgaagtcagtacggtggatgccatgttagatctcatcag

SEQ ID NO: 8332 - DNA, 1381 bp, Homo sapiens
gccttatctttccagtcgtccagcatgctctgcccaccccacgccgaggtgcactgaccatgagcctcaactcctccctcagctgcaggaaggagctgagtaatctcactgaggaggagggtggcgaagggggcgtcatcatcacccagttcatcgccatcattgtcatcaccatttttgtctgcctgggaaacctggtcatcgtggtcaccttgtacaagaagtcctacctcctcaccctcagcaacaagttcgtcttcagcctgactctgtccaacttcctgctgtccgtgttggtgctgccttttgtggtgacgagctccatccgcagggaatggatctttggtgtagtgtggtgcaacttctctgccctcctctacctgctgatcagctctgccagcatgctaaccctcggggtcattgccatcgaccgctactatgctgtcctgtaccccatggtgtaccccatgaagatcacagggaaccgggctgtgatggcacttgtctacatctggcttcactcgctcatcggctgcctgccacccctgtttggttggtcatccgtggagtttgacgagttcaaatggatgtgtgtggctgcttggcaccgggagcctggctacacggccttctggcagatctggtgtgccctcttcccctttctggtcatgctggtgtgctatggcttcatcttccgcgtggccagggtcaaggcacgcaaggtgcactgtggcacagtcgtcatcgtggaggaggatgctcagaggaccgggaggaagaactccagcacctccacctcctcttcaggcagcaggaggaatgcctttcagggtgtggtctactcggccaaccagtgcaaagccctcatcaccatcctggtggtcctcggtgccttcatggtcacctggggcccctacatggttgtcatcgcctctgaggccctctgggggaaaagctccgtctccccgagcctggagacttgggccacatggctgtcctttgccagcgctgtctgccaccccctgatctatggactctggaacaagacagttcgcaaagaactactgggcatgtgctttggggaccggtattatcgggaaccatttgtgcaacgacagaggacttccaggctcttcagcatttccaacaggatcacagacctgggcctgtccccacacctcactgcgctcatggcaggtggacagcccctggggcacagcagcagcacgggggacactggcttcagctgctcccaggactcaggtaacctgcgtgctttataagcctctcacctgtcgcgttttccctgtgttgcgtttcccccgtgtcgcgtttcccctgtgcaggctcaagagctggcggaggggcatttcccacggtg

SEQ ID NO: 8333 - DNA, 1191 bp, Homo sapiens
cagtgcaagggagatcatgtttgactgtatggatgttctgtcagtgagtcctgggcaaatcctggatttctacactgcgagtccgtcttcctgcatgctccaggagaaagctctcaaagcatgcttcagtggattgacccaaaccgaatggcagcatcggcacactgctcaatcaattgaaacacagagcaccagctctgaggaactcgtcccaagccccccatctccacttcctccccctcgagtgtacaaaccctgcttcgtctgccaggacaaatcatcagggtaccactatggggtcagcgcctgtgagggatgtaagggctttttccgcagaagtattcagaagaatatgatttacacttgtcaccgagataagaactgtgttattaataaagtcaccaggaatcgatgccaatactgtcgactccagaagtgctttgaagtgggaatgtccaaagaatctgtcaggaatgacaggaacaagaaaaagaaggagacttcgaagcaagaatgcacagagagctatgaaatgacagctgagttggacgatctcacagagaagatccgaaaagctcaccaggaaactttcccttcactctgccagctgggtaaatacaccacgaattccagtgctgaccatcgagtccgactggacctgggcctctgggacaaattcagtgaactggccaccaagtgcattattaagatcgtggagtttgctaaacgtctgcctggtttcactggcttgaccatcgcagaccaaattaccctgctgaaggccgcctgcctggacatcctgaccgccaggaccttgaggaaccgacaaaagtagataagctacaagaaccattgctggaagcactaaaaatttatatcagaaaaagacgacccagcaagcctcacatgtttccaaagatcttaatgaaaatcacagatctccgtagcatcagtgctaaaggtgcagagcgtgtaattaccttgaaaatggaaattcctggatcaatgccacctctcattcaagaaatgctggagaattctgaaggacatgaacccttgaccccaagttcaagtgggaacacagcagagcacagtcctagcatctcacccagctcagtggaaaacagtggggtcagtcagtcaccactcgtgcaataagacattttctagctacttcaaacattccccagt

SEQ ID NO: 8334 - DNA, 582 bp, Homo sapiens
ctcatttcctcccagcctcgtgcgggaaatggctttaattctgacggcagggctgtgagggactagcgggaacccgagccttttgtcaaggaactgcggcgtcggtggccagtcatccccgccgccgcggagccgctgcactgctgggggatctcccagcagctctgacgagcgcgggctgcagcatgggcagaaaacgctgccctgcagattagctgggtggattttttaagcgcaccccaccccccaaacccataaaataacaaaaccaacccgcagtggccgaccggagatagctaagatgccgcgcaggagtttccacctggatgtttgaggttgtgtagatgtggccggcacccttgagagtggagctagggggtgcagactgagcagtgaacagaaggagccttggacagggctgggccagcctcccggaattccaaaggtttttgaaactctgtgccaggaaccagggacaaagatgacatatagtctttcttatatcatacctggctcatcacacgctggtctcctctgatcttcagcatcctgagttccaggagcgaattgcaaacccaccgg

SEQ ID NO: 8335 - DNA, 885 bp, Homo sapiens
gacagccagtagaggtgacttcatgttttctgcggatcgtttgggtacaagtatgaaggagtgaaatttgagaagggaaattgtggggtcagcataatgagaagcggtgaggcaatggaacaaggtttacgagactgctgtcgatccatacgaattggaaagatcctgattcagagtgatgaggagacacaaagagccaaagtatattatgccaaattccccccagacatttaccggagaaaagtccttctgatgtatccaattctcagcactggaaatactgtaattgaagctgtaaaggttcttatagaacatggagttcaacccagtgttatcatcctactcagtctgttctccactcctcatggtgccaaatcaatcattcaggagtttccagagatcacaattttaactactgaagttcatcctgttgcacctacacattttggacagaaatactttggaacagactaagttatttaagtaaaataattatcttatgtaatattacaatcatgttttgattttctatttgttttactgattcacttgagggtggcagagaaaaatgtgttaaaatgctttttagttttggaagtgggtatatttgaggttatatctcatttagttatttgtttactgttggcaccgaattcaacaatgaagtatatgcaactcttacaaaacataaattttaataatattctaatgcaaattactgaaccctcagtgcattaaaattatttcctaatttatgagcctcttagtttggaggttgcttgaagccacaaataaaactcaaatgagagtcagttctttgtcccactgtagtttgcattttgtttagtttggttttagctctactaaggtttcacatatgtggct

SEQ ID NO: 8336 - DNA, 735 bp, Homo sapiens
aggacacggttaaagcattgctatcaactgtgaacccagagagccctccttagccaacacgctaactccgaagcctcccttacgcccccgaaccaccgaaggcggcgacacctgattcagcgcacaaacacaggtcccttctgtcccggatacaattacgcggcagacacacactcaaactcgcgcggggcagccaagagacgagtgagagtaacacatgcgcactgtggattcctttgtgaatacataaaaggaaaagttaaaactcttataattcacactatccagagaaaaacaatactattttgctatgaagtcttacactccatatttcattctcctgtggagtgctgttgggatagcgaaggctgccaaaatcatcatcgtgccgccaattatgtttgaaagccatatgtacattttcaagacgctagcctcagccttgcacgagagaggccaccatacagtgttcctcctctctgaaggcagagacatcgccccatctaatcattacagcctccagcgctacccagggatctttaacagtaccacctcagatgctttcctacagtccaagatgcggaatattttctctgggagattgacagcaatcgaactgtttgacatactggatcactatactaagaactgtgacctgatggttggcaaccatgccctgatccagggtctgaagaaagaaaaatttgacctgctgctggtggaccctaatgatat

SEQ ID NO: 8337 - DNA, 970 bp, Homo sapiens
aagtctacatgaaaaggatggtttcttggagcttccacaaacttaaaaccatgaaacatctattattgctactattgtgtgtttttctagttaagtcccaaggtgtcaacgacaatgaggagatgagaaaactggggcacagataaagcaacttgcccaaggtctcatagctgtaagtcaaccctacggtcaagacctacaagtagccgagctccagagtacattatgagggtcaaagattgtcttattacaaataaattccaagtagaatcaacctttaataagtctttaatgtctcttaaatatgtttatataggagtctaatcaccaattcacaaaaatgaaagtagggaaatgattaacaataatcataggaatctaacaatccaagtggcttgagaatattcattcttcttgacagtatagattctttacaatttcgtaagttccaatgtatgttttaggaatatgaggtcattactattcataatctgatacagctttatcctaaggcctctctttaaaaactacactgcatcatagcttttttgtgcagttggtctttctactgttactgaacagtaagcaacctacagattcactatcaccaaccagccagttgatggatcttaagcaaattatcaagcttgtgataacctaaattataaaatgagggtgttggaatagttacattccaaatcttctataacactctgtattatatttctgcctcattccttgtagggtttcttcagtgcccgtggtcatcgaccccttgacaagaagagagaagaggctcccagcctgaggcctgccccaccgcccatcagtggaggtggctatcgggctcgtccagccaaagcagctgccactcaaaagaaagtagaaagaaaagcccctgatgctggaggctgtcttcacgctgacccagacctgggggtgttgtgtcctacaggatgtcagttgcaag

SEQ ID NO: 8338 - DNA, 2906 bp, Homo sapiens
gagagtgcggctgctgagagccgagcccagcaatcccgatcctctgagtcgtgaagaagggaggcagcgagggggttggggttggggcctgaggcaaggctccgctcttgccagagggacaggagccatggctcagaaaatggactgtggtgcgggcctcctcggcttccaggctgaggcctccgtagaagacagcgccttgcttatgcagaccttgatggaggccatccagatctcagaggctccacctactaaccaggccaccgcagctgctagtccccagagttcacagcccccaactgccaatgagatggctgacattcaggtttcagcagctgccgctaggcctaagtcagcctttaaagtccagaatgccaccacaaaaggcccaaatggtgtctatgatttctctcaggctcataatgccaaggatgtgcccaacacgcagcccaaggcagcctttaagtcccaaaatgctaccccaaagggtccaaatgctgcctatgatttttcccaggcagcaaccactggtgagttagctgctaacaagtctgagatggccttcaaggcccagaatgccactactaaagtgggcccaaatgccacctacaatttctctcagtctctcaatgccaatgacctggccaacagcaggcctaagacccctttcaaggcttggaatgataccactaaggccccaacagctgatacccagacccagaatgtaaatcaggccaaaatggccacttcccaggctgacatagagaccgacccaggtatctctgaacctgacggtgcaactgcacagacatcagcagatggttcccaggctcagaatctggagtcccggacaataattcggggcaagaggacccgcaagattaataacttgaatgttgaagagaacagcagtggggatcagaggcgggccccactggctgcagggacctggaggtctgcaccagttccagtgaccactcagaacccacctggcgcaccccccaatgtgctctggcagacgccattggcttggcagaacccctcaggctggcaaaaccagacagccaggcagaccccaccagcacgtcagagccctccagctaggcagaccccaccagcctggcagaacccagtcgcttggcagaacccagtgatttggccaaacccagtaatctggcagaacccagtgatctggccaaaccccattgtctggcccggccctgttgtctggccgaatccactggcctggcagaatccacctggatggcagactccacctggatggcagaccccaccgggctggcagggtcctccagactggcaaggtcctcctgactggccgctaccacccgactggccactgccacctgattggccacttcccactgactggccactaccacctgactggatccccgctgattggccaattccacctgactggcagaacctgcgcccctcgcctaacctgcgcccttctcccaactcgcgtgcctcacagaacccaggtgctgcacagccccgagatgtggcccttcttcaggaaagagcaaataagttggtcaagtacttgatgcttaaggactacacaaaggtgcccatcaagcgctcagaaatgctgagagatatcatccgtgaatacactgatgtttatccagaaatcattgaacgtgcatgctttgtcctagagaagaaatttgggattcaactgaaagaaattgacaaagaagaacacctgtatattctcatcagtacccccgagtccctggctggcatactgggaacgtaagatgggaaagaaggtggaacatggcctttctcagtggtgctttttttctaggagtttcacgtagatcagggtccagggttcagggtcacatagcaggtcatgggcagagctggggtataattctcccctagctgaggaatattggggaggctagatgggcaagctggttggggtctctcatgcaaatggctactgaaaatatattctttctatattcccttaggaccaaagacacacccaagctcggtctcctcttggtgattctgggtgtcatcttcatgaatggcaaccgtgccagtgaggctgtcctctgggaggcactacgcaagatgggactgcgtcctggggtgagacatcccctccttggagatctaaggaaacttctcacctatgagtttgtaaagcagaaatacctggactacagacgagtgcccaacagcaaccccccggagtatgagttcctctggggcctccgttcctaccatgagactagcaagatgaaagtgctgagattcattgcagaggttcagaaaagagaccctcgtgactggactgcacagttcatggaggctgcagatgaggccttggatgctctggatgctgctgcagctgaggccgaagcccgggctgaagcaagaacccgcatgggaattggagatgaggctgtgtctgggccctggagctgggatgacattgagtttgagctgctgacctgggatgaggaaggagattttggagatccctggtccagaattccatttaccttctgggccagataccaccagaatgcccgctccagattccctcagacctttgccggtcccattattggtcctggtggtacagccagtgccaacttcgctgccaactttggtgccattggtttcttctgggttgagtgagatgttggatattgctatcaatcgcagtagtctttcccctgtgtgaggctgaagcctcagattccttctaaacacagctatctagagagccacatcctgttgactgaaagtggcatgcaagataaatttatttgctgttccttgtctactgctttttttccccttgtgtgctgtcaagttttggtatcagaaataaacattgaaattgcaaagtg

SEQ ID NO: 8339 - DNA, 782 bp, Homo sapiens
ttctgtcttctctctctctctcccacttttcctccctctcccgctccgtctcacacgcaccctctgtttattttcctgcctccatctgggccctgctgatattgtaatcaccctgatgcacgttggcttctctcctctccctcctgcgctcacacactcactcacacacaatgtgccatcctgacaaggcttttacttctgataagctccaatgtgtgtttaatgaatacaaagccgcggtctgggtgccgcctcggccgcggccgctctcccgcgctcctttgccagaagaaaagattgatctctgggctggtgaacataatctctgtcccagtcagaaaaggagagaggaaattagcagagcgattggtggagaatgatatctgtcaaaagaaacacttggagagcactgagtttagtaataggtgactgccggaaaaaagggaactttgaatattgtcaagatcgtactgagaagcactccacaatgccagactcacctgtggatgtgaagacgcaatctaggctgactcctccaacaatgccacctcccccaactactcaaggagctccaagaaccagttcatttacaccgacaacgttaactaatggcacgagccattctcctacagccttgaatggcgccccctcaccacccaatggcttcagcaatgggccttcctcttcttcctcctcctctctggctaatcaacagctgcccccagcctgtggtgccaggcaactcagcaagctgaaaaggttccttactaccctgcagcagt

SEQ ID NO: 8340 - DNA, 2793 bp, Homo sapiens
tccatggcgctgtgcgaggccgcgggctgcgggagtgccctgctctggcctcgcttgttgctcttcggggactccatcacccagaaaatgtgatgttctgaatcgtggattttcaggttacaataccaggtgggccaaaattatccttccaagattaatcaggaaaggaaacagtttggacatcccagtagcagttacaattttctttggggccaatgacagtgcactaaaagatgagaatcccaagcagcacattcccctggaggagtacgctgcgaacctaaagagcatggtgcagtacctgaagtccgtggacatccctgagaatcgagtcattctcatcacgccgaccccactttgtgaaacagcctgggaagaacagtgcatcatacaaggttgcaaactaaatcgcctgaactctgttgttggtgaatatgccaatgcgtgtttacaagtggcccaagactgtgggactgacgtacttgacctgtggaccctgatgcaggacagccaggtacggtggcttgctcggtcctctcggggtaaataggatcacacagaagtaaaccaggtgtgtgtgcagcagctttccctagaaaggccctgcttagctaagacagtcatccctttagccaatgaaaacaaacaggcttgggggaggggaggaatggaggttccaggatggctcacaagcccagcagcttaattcagccaggctccttggctaggagttagtgcgcagtgacatcaatgagcaacacatggctcatatttatgaacgtccaggccaagttcttctttcatacagagaatggcagaaagctaaaacttgttaataggtaaaacaatgaatttaaatacagtattggctaataaaactgtttgagatatgtagttctaattaagttactttgttttaaagcctgaaagcacaaatataaaaggtaaaaagcaggtcccatggaatggtgcactgactcaggagacagctggtttctgacgcagtcacacatacacttagggaggacctggcagtccactcctgggttatctgccctagagaaatgaaaactatgttcacacagaacctgggtgtaactgttgacagcagcattattcctacctgctggaaacacgccagtgtccttctgtgatgaatagggaaactggtgtgtccgtggaatgggatactactcggcaataaagaggaggaactgacaagcgcagcaacgtgggtgactctcgaggcgcttcactgagggaaggaagctggtctctgaaggctacttactacatgagtccatctgttttggtgtctcaaaaaggcaagacttgggctgggtgtggtggctcacacctgtaatcccatcactttgggaggccaaggcaggtggatcacctgagttcaggagttcaagaccagcctggccaacatggcgaaaccctgtctctactaaaaatacaaaaattagctgggcatggtggagcgcgcctgtaatcccagctacccaggaggctgaggtgtgagaatcgcttgaacccgggaggcagaggtcacaccactgcactccggtctggaggatacagggagactgtctcaccctccccagcccaccccccaaaaaaaggcaagactgcagtaacagaacaggtccatggtggccagaggttagggcaaggaaaggtatggctaaattcaggttccacacagatactggtgaagaggggcagacaggcactggtcttttttaatttttctgtgaccttgtgctactcttttgtaaagagcttgttcagtagggcacattaaaggctacttcattgctatgctgggatccagagagaaagcttggacgggactgatgatatttgaagtactcaagggaaggaaggatccagtgtgcgggaagctctttggacaaacgggaagactcacagcctcaccggtttcctctattcctagctgttaggtttaggctacttggacaaagcaacatagaaaacagccaagaaactaacccaagtgccaactttttcctctcccctaaatattaatccataccaatcgttccaatgacctacacatttattatccatctgtaatagggaaaatggtcaccagtgggaaagtcatactaccacgtggatgccgagtcaccagtcacctttggaggccctgagagcctaagcagatctggaccctaggcctctagtcttcctctgaaaccctggagtactggaaccttccagaattccagattaggaggggccttggcagcttgagtgccaaaagggtcgacatctagagttctgttgtctaggaaaggaaactgcaaactattgggctagttttgctcacatgtctttttcaatttaatacaaaactgagagggtcgtccttagagatcatctcatctcaaactgcctagatgagaaaaccaaggccgaagaagaagtgctactattatatgatagcatctaaatttctggtctattaaaagtcacataaggccgggcgcggtggctcatgcctatcatcccaacatttcgggaggctgaggcaggtggatcacctgaggtcaggagttcgagaccagcctggccaacatgttgaaaccccatctctacttaaaaatacaaaaattagccaggcgtggtggcagtcacctgtaatcccagctacttgggaggctgaggcaggagaatcacctgaacccgggaggcagaggttgaattaggccgagactgtgccatcgttctctagcctgggcaacaagagtgagactctagctc

SEQ ID NO: 8341 - DNA, 545 bp, Homo sapiens
agtgtgtgtgctggggctggggcggctacatagctgtgactaccagggggtgcagtctctggggaccaccactaccgaggctgggtaccatgattatcgcggaacacctgcccattaatcttgaccctgttaaaacaataactgcctatccagatatgccacacttctgcctgctgttggcaaccctcctggactaggctgctcttgttaatcacatggatgttgttccttaaggttgccagcatgaaagtgcttcagatggctttgagtcctaatcttgtggttctgttcactgaagataagcagcaattttttgattattttattttcctatggattgccaataggtctaaataacctccttagttgtactggcaggaccaagtaaaaagacaagggatgaaaaggagggaaggaaaaaaaggaaagaaagagagaaagagcgaggaaatatgagaaagaaaaagaggagggaaagaggaaagagagaattgtcttgggaaggtgatataggccactaattactttagagctgcaagcctcct

SEQ ID NO: 8342 - DNA, 1144 bp, Homo sapiens
agtgatcaatcccggggcgatttacagatgcaggatcggaaagaatcccggccagacgtgcgaacagctccagctgggtagccctaatggagaaccttgtggaaagacttgtttggaagagagagacaatcagtggttgggggtcacactttccagacagccaggagaaaatggatccatcgtgattatgtgaaaaaatttggagaaaattttgcatcatgtcaagctggaatatccagtttttacacaaaggtaattgttcaaaaaatagctgctataaatgtttacatatagaatcttaattcttctcatggtttggaagactgatatgttttaaagtaaaaattgtgtaacatcttcatcatgtctcttaaacttgagtattacaacttaatttttgccactcaaaattccacatatatttcaataaaatatcaatatttaggtggctatactgcataagatgaatgaaaatctatactaaagaacatttctttcatcaacaatttaatgaaaatcaaaagtagctatggttaattgtcttgttaacttaggtattgaaaatatcaacccaagtatgttattttaaatttctagttgaggggcaaaggaagaatatcagtctatatttttcattaaattatgataattgggaaatttaagaatttaatatccccttaaatcagatagacaatattcccaagatttcttactctctttctaacattctaggatatgtatgaaagggcacagttgtactcaaccccaaatctctcagttttcttaaaaacacactgtgaattcaggaatgttttttgactccatgaagatcaggcactatatcaagtttggggttgacagtgtctgcacatattaacagttatattaaaatgcttacaaagaaaatgctttcttcagtttaagttgactttttttaagtttaggattgtttaggagtatagaaatatgctaaagatatttaattgctgaaagtgttcatactataccaggcaagggcatgctcattccaatcttctcctaaattttcctctgtataacaaaatatgccccacattccattggacttttttccctaagctaacattattagaaatgttttccctaagctaacattattagtcag

SEQ ID NO: 8343 - DNA, 596 bp, Homo sapiens
agagagaaaaagtaaaagaccgaagaaggaggctggagagaccaggatccttccagctgaacaaagtcagccacaaagcagactagccagccggctacaattggagtcagagtcccaaagacatggaacccacccactgatccccatccatccctagtaccagtcacggctgctctagcatttcggccttgtcaactactgcaggccctgatcaaggaggcctctgttcatggggcttgttagagtgctgtgcaagatgtctggtaggggccccctttgcttccctggtggccactggattgtgtttctttggggtggcactgttctgtggctgtggacatgaagccctcactggcacagaaaagctaattgagacctatttctccaaaaactaccaagactatgagtatctcatcaatgtgatccatgccttccagtatgtcatctatggaactgcctctttcttcttcctttatggggccctcctgctggctgagggcttctacaccaccggcgcagtcaggcagatctttggcgactacaagaccaccatctgcggcaagggcctgagcgcaacggtaacagggggccagaag

SEQ ID NO: 8344 - DNA, 527 bp, Homo sapiens
gcggccgctcctgcgatagcctcaacaaccgatgtgagggctcctcggtccagacacggacctgccacattcaggagtgtgacaagagatttaaacaggatggtggctggagccactggtccccgtggtcatcttgttctgtgacatgtggtgatggtgtgatcacaaggatccggctctgcaactctcccagcccccagatgaacgggaaaccctgtgaaggcgaagcgcgggagaccaaagcctgcaagaaagacgcctgccccatcaatggaggctggggtccttggtcaccatgggacatctgttctgtcacctgtggaggaggggtacagaaacgtagtcgtctctgcaacaaccccacaccccagtttggaggcaaggactgcgttggtgatgtaacagaaaaccagatctgcaacaagcaggactgtccaattggtgagccacgcagcccaggatgaaacgacccaggagctttgctcttttactgaatgctgcagtcagcattcgaggagattccagct

SEQ ID NO: 8345 - DNA, 720 bp, Homo sapiens
tgagaaaaaaaggaatatgaaacatgcaagacttttattagcaacaatttttatatttttgaaatttttatataaagattaagcaaataactaaagattttaatgttgttaatagaaacctagaggaaagttcataaatctttataaaagcaatttttaaaatttgtatttttaattgttccctctttcatatttcaggttagtctttaaaaagctgtttaataaagagaattccagatattatttccagtagtccatataactttaactattatcacttcaaaaataacaatagatgtatttcagtaattagattaattgcaattctctatatttttgcagttttgttttataacatgagtttggatgtgaacagaaaggcagagtctccaccaagattctatttctcttctaatggaacttctgacgtgattacaggaagcatacaggtgtccagcagagaagctaactgtagaacacatcaagcatttatgcggaaagatgtgcgggacatcctcaccccaattcagattgaagctgcttaccaccttggtcctcatgtcatcagtaaacgaagtacagaggaattcccaccacttcagccaattcttcagcagaagaaagaaaaagacataatgaaaaaaacaataaactttgcaaggttttgtgcccatgaaaattgttctgctgatttacaggtttctgcaaagattgggtttt

SEQ ID NO: 8346 - DNA, 499 bp, Homo sapiens
gaaaggaactagactgatggtctgcttttctgttttggaagtgccagtgcctgtagtcagcctgaatatttatgatgttggccctaccaccatgcatgtgcagtggcagcctgtgggaggagctactggctacatcttgtcatacaaacctgttaaggacacagagccaacaagacccaaagaggtgcgtttggggccaacagtgaatgacatgcagctgactgaccttgttcccaacacggagtatgcagtcacagtccaggctgtcctgcacgacctcactagtgaacctgtcactgttcgggaagtcaccttgcctttacccagacctcaggatctgaaactcagagatgtgactcacagcactatgaatgtcttttgggaacctgtgcctggaaaagtgcgtaaatatattgttcgatacaaaacaccagaagaggatgtcaaagaggtaggttgaagatgatagtagatatgaaaatatttgttttcctagtag

SEQ ID NO: 8347 - DNA, 1003 bp, Homo sapiens
gcttaaaaaagcacagggagatcgcgggcagctttgcagtcgctgccttctcgcgcctgaccatgcacccctgcatcttcctgctgggccacaggcgagcgctttatttctggagctgagggctaaaacttttttgacttttcttctcctcaacatctgaatcatgccatgtgcccagaggagctggcttgcaaacctttccgtggtggctcagctccttaactttggggcgctttgctatgggagacagcctcagccaggcccggttcgcttcccggacaggaggcaagagcattttatcaagggcctgccagaataccacgtggtgggtccagtccgagtagatgccagtgggcattttttgtcatatggcttgcactatcccatcacgagcagcaggaggaagagagatttggatggctcagaggactgggtgtactacagaatttctcacgaggagaaggacctgttttttaacttgacggtcaatcaaggatttctttccaatagctacatcatggagaagagatatgggaacctctcccatgttaagatgatggcttcctctgcccccctctgccatctcagtggcacggttctacagcagggcaccagagttgggacggcagccctcagtgcctgccatggactgactggatttttccaactaccacatggagactttttcattgaacccgtgaagaagcatccactggttgagggagggtaccacccgcacatcgtttacaggaggcagaaagttccagaaaccaaggagccaacctgtggattaaagggtattgtgactcacatgtcctcctgggttgaagaatctgttttgttcttttggttgttttattaaaacatgacctattcttactcaagtctcttatctcctctgtattcttttttttttaatatcttcatgacattcaaatctcttctgtattctcttgccagaaagtgtacattctttttgcttgtataaaccctttcacttgtc

SEQ ID NO: 8348 - DNA, 865 bp, Homo sapiens
atggttactcacagtttaagctttgccagcacgaaccccatggactcttgatccctatgtggtaacttaggaaacttggtgcttataggagtaagttctcctgggtttctaagaataaggcttaaataccctttctctaaagagccaagaaaagatgccacctttactgtcagtccaaggagactggagatgttgcttacatgaaacaactggtgcatgatggaacgcactgttcttacaaagatccatatagcatatgtgtgcgaggagagtgtgtgaaagtgggctgtgataaagaaattggttctaataaggttgaggataagtgtggtgtctgtggaggagataattcccactgccgaaccgtgaaggggacatttaccagaactcccaggaagcttgggtaccttaagatgtttgatataccccctggggctagacatgtgttaatccaagaagacgaggcttctcctcatattcttgctattaagaaccaggctacaggccattatattttaaatggcaaaggggaggaagccaagtcgcggaccttcatagatcttggtgtggagtgggattataacattgaagatgacattgaaagtcttcacaccgatggacctttacatgatcctgttattgttttgattatacctcaagaaaatgatacccgctctagcctgacatataagtacatcatccatgaagactctgtacctacaatcaacagcaacaatgtcatccaggaagaattagatacttttgagtgggctttgaagagctggtctcagtgttccaaaccctgtggtggaggtaaccattgaacacatttattatattaaaatgtaatgcatataaaaaccaa

SEQ ID NO: 8349 - DNA, 3322 bp, Homo sapiens
aaaggaaacacaagttgcttttgataacacatgatgcaaagaaagaattagaaagaatgagcaatgaagccggtataaatgacaaacaagtgtccaaaggcccaagaagttactaccaaaagctttcaaacaatattggtttatctttaaagacacatccatagcatactttaaaaataaggaacttgaacaaggagaaccactagaaaaactaaatcttagaggctgcgaagttgtgcccgatgtaaatgtagcaggaagaaaatttggaatcaagttactaatccctgttgccgatggtatgaatgaaatgtatttgagatgtgaccatgagaatcaatacgcccaatggatggctgcctgcatgttggcatcgaagggcaaaaccatggcagacagctcctaccagccagaggtcctcaacatcctttcatttctgaggatgaaaaacaggaactctgcatctcaggtggcttccagtctcgaaaacatggatatgaacccagaatgttttgtgtcaccacggtgtgcaaaaagacacaaatccaaacagctggccgcccggatcctggaggcgcaccagaacgtggcccagatgcccctggtcgaagccaagctgcggttcatccaggcgtggcagtcactgcctgagtttggcctcacctactaccttgtcagatttaaaggaagcaaaaaagatgacattctgggagtttcatataacaggttgattaaaattgatgcagccaccgggattccagtgacaacatggagattcacaaatatcaaacagtggaatgtaaactgggaaacccggcaggtggtcatcgagtttgaccaaaacgtctttactgctttcacctgcctgagtgcagattgcaagattgtgcacgagtacattggcggctacattttcttgtccacccgctccaaggaccagaatgaaacactcgatgaggacttgttccacaaattgaccggcggtcaggattgaaacaagcacgcgtgctcggctcacaccaacaaggcaagccaaaggcgcccctccccagagggatccctaacgtgcccagcatgtagattctggactaacagacaacatacattcaccgctggtcacccagatcctcattcaaacccactgctggcacatccctttccttactttgccctgtgctaccagccacggaaggagcctctcttgttttttctataaaatgggtaggcaggagaaaagcaggtgccctaagattgctctaaggcccagcatgtggttacagttctctgacttgcagaacctgccaggtgtatggctacaagttatcctcgtgctgatctgtctcattactaagtcaatggagaagacagaaaggtaaaaatcacgtgtagcaagaacaactcttatttcacaaactcaggtatgaaacgaaacgcctgtccttcatggaactgcttttagctcctgtcttttcaaaatggcagagggagttcctacacacactttttccctggaggccaaggtctaggggtagaaaggggaggggtggggctaccaggtagcagttgacaacccaaggtcagaggagtggccctcagtgtcatctgtccacagtgatacctgccaagatgaccactgacccacatctggtcttagtcattggtctcctcagatttctggggccacctgcaagccccattccattcctacagatctctcagccacctgtaagtcctttgtgaagatgtgggtgacacagggggacaggaaaacccatttctcaacccagatccatgtctccactgcttctactctgggttgggattcaggaagacaggcacagtcctctctgttcatagaaacacctgccagtgtcaaggattccagtcaggtgtctatcccaactggtcagggagagaagggcagacccattctcaaagaccaccatgtccaaggtctgacagctccccactggctgcccccacaggggctttaggctggtctgggtcatggggaagcgtccctcttatcgctggtctgtgttctcctggatttggtatctatgttggtacgactcctggccttttatctaaaggactttggcttttgtaaatcacaagccaataatagacttttttctccccctctgttttttgctgtgtcatctctgccttgagactgccttgagacagtgcttgccttgagagagtgagccaattaacagctgcctgaattgtcattttccattttggtttgttagaggtgggaggggtgggttttgagaaggtcaaaagcaataccagaagtaaagggaaatatcagacaatattttattattttttcatagatgttctgccacacaaagaacttggggtgtaaggataaggcaaaagctccaatcccatttttcagttctcctaggatgcacccctcagggagcctggccagagttccgaggcccgtgagcgtcagctgttgctttattttccatcaaagccctctgagaagtgagacctcagcaattccgggagccacatagagacagacttggcaagggaccccctggttctgagccagtagctgccatctggaaattcctcttttagcctctccttagaggtgaatgtgaatgaagcctcccaggcacccgctgaatttctgaggccttgcttaaagctcagaagtggtttaggcatttggaaaatctggttcacatcataaagaacttgatttgaaatgttttctatagaaacaagtgctaagtgtaccgtatatacttgatgttggtcatttctcagtcctatttctcagttctattattttagaacctagtcagttctttaagattataactggtcctacattaaaataatgcttctcgatgtcagattttacctgtttgctgctgagaacatctctgcctaatttaccaaagccagaccttcagttcaacatgcttccttagcttttcatagttgtctgacatttccatgaaaacaaaggaaccaactttgttttaaccaaactttgtttggttacagttttcaggggagcgtttcttccatgacacacagcaacatcccaaagaaataaacaagtgtgacaaaaaaaaaaaaaaacaaacctaaatgctactgttccaaagagcaacttgatggttttttttaatactgagtgcaaaaggtcacccaaattcctatgatgaaattttaaattaatgggcacctttcaacatcatttgcttccttatctacagttgattcagaaatctgcattttttattcttttatatgacttttaagtaaaagatttatatggatttga

SEQ ID NO: 8350 - DNA, 2743 bp, Homo sapiens
agaatttgaatacatacagtgagaccctagagctcaagcattgtatatctttacctgagatcttacaaagaggaagatgaagatgtaaaagaataaagtaggctatgctgatatttcacatcctggccagagatcaccctgcttttgtaaagctttggagaaaatgggtactggatttttccaactaccacatggagactttttcattgaacccgtgaagaagcatccactggttgagggagggtaccacccgcacatcgtttacaggaggcagaaagttccagaaaccaaggagccaacctgtggattaaaggacagtgttaacatctcccagaagcaagagctatggcgggagaagtgggagaggcacaacttgccaagcagaagcctctctcggcgttccatcagcaaggagagatgggtggagacactggtggtggccgacacaaagatgattgaataccatgggagtgagaatgtggagtcctacatcctcaccatcatgaacatggtcactgggttgttccataacccaagcattggcaatgcaattcacattgttgtggttcggctcattctactcgaagaagaagagcaaggactgaaaatagttcaccatgcagaaaagacactgtctagcttctgcaagtggcagaagagtatcaatcccaagagtgacctcaatcctgttcatcacgacgtggctgtccttctcaccagaaaggacatctgtgctggtttcaatcgcccctgcgagaccctgggcctgtctcacctttcaggaatgtgtcagcctcaccgcagttgtaacatcaatgaagattcgggactccctctggctttcacaattgcccatgagctaggacacagcttcggcatccagcatgatgggaaagaaaatgactgtgagcctgtgggcagacatccgtacatcatgtcccgccagctccagtacgatcccactccgctgacatggtccaagtgcagcgaggagtacatcacccgcttcttggaccgaggctgggggttctgtcttgatgacatacctaaaaagaaaggcttgaagtccaaggtcattgcccccggagtgatctatgatgttcaccaccagtgccagctacaatatggacccaatgctaccttctgccaggaagtagaaaacgtctgccagacactgtggtgctccgtgaagggcttttgtcgctctaagctggacgctgctgcagatggaactcaatgtggtgagaagaagtggtgtatggcaggcaagtgcatcacagtggggaagaaaccagagagcattcctggaggctggggccgctggtcaccctggtcccactgttccaggacctgtggggctggagtccagagcgcagagaggctctgcaacaaccccgagccaaagtttggagggaaatattgcactggagaaagaaaacgctatcgcttgtgcaacgtccacccctgtcgctcagaggcaccaacatttcggcagatgcagtgcagtgaatttgacactgttccctacaagaatgaactctaccactggtttcccatttttaacccagcacatccttgtgagctctactgccgacccatagatggccagttttctgagaaaatgctggatgctgtcattgatggtaccccttgctttgaaggcggcaacagcagaaatgtctgtattaatggcatatgtaagatggttggctgtgactatgagatcgattccaatgccaccgaggatcgctgcggtgtgtgcctgggagatggctcttcctgccagactgtgagaaagatgtttaagcagaaggaaggatctggttatgttgacattgggctcattccaaaaggagcaagggacataagagtgatggaaattgagggagctggaaacttcctggccatcaggagtgaagatcctgaaaaatattacctgaatggagggtttattatccagtggaacgggaactataagctggcagggactgtctttcagtatgacaggaaaggagacctggaaaagctgatggccacaggtcccaccaatgagtctgtgtggatccagcttctattccaggtgactaaccctggcatcaagtatgagtacacaatccagaaagatggccttgacaatgatgttgagcagcagatgtacttctggcagtacggccactggacagagtgcagtgtgacctgcgggacaggtatccgccgccaaactgcccattgcataaagaagggccgcgggatggtgaaagctacattctgtgacccagaaacacagcccaatgggagacagaagaagtgccatgaaaaggcttgtccacccaggtggtgggcaggggagtgggaagcatgctcggcgacatgcgggccccacggggagaagaagcgaaccgtgctgtgcatccagaccatggtctctgacgagcaggctctcccgcccacagactgccagcacctgctgaagcccaagaccctcctttcctgcaacagagacatcctgtgcccctcggactggacagtgggcaactggagtgagtgttctgtttcctgtggtggtggagtgcggattcgcagtgtcacatgtgccaagaaccatgatgaaccttgcgatgtgacaaggaaacccaacagccgagctctgtgtggcctccagcaatgcccttctagccggagagttctgaaaccaaacaaaggcactatttccaatggaaaaaacccaccaacactaaagccc

SEQ ID NO: 8351 - DNA, 1593 bp, Homo sapiens; identical to SEQ ID NO: 7776

SEQ ID NO: 8352 - DNA, 548 bp, Homo sapiens
gaaaggcagccacttctttatccatctagcatctgacttgtgaggttaggggtcccacagcctgagaggaggtgggaacctcccatccttcccagcaggagcctcgatggctgcacagagagggctggagtatctgtgagaggcgaggctttcattctctttatctgaaactgaaaaattattactttactgttctttttggccatgaaggtcagaagccactggagctgcgctgtgaggaggagcaggatggtaaagagtggatggaggccattcaccaagccagttatgcagacattttgattgagagggaagtattaatgcagaagtacattcatctagttcagatcgtagagacagaaaaaattgcagctaaccaactccgacatcaacttgaagatcaagacacagaaatcgaaaggcttaaatcagagattattgctcttaataaaaccaaagaacgaatgcgaccttaccaaagcaaccaagaagacgaagatccagacatcaagaagattaaaaaggttcagagcttcatgcgaggatgg

SEQ ID NO: 8353 - DNA, 740 bp, Homo sapiens
agagcgcgcgaggttcggggagctcggccaggctgctggtacctgcgtccgcccggcgggtctcactctgttgcccaggctgcagtgcagtggcatgatcatagttcacttcagtcttgaactccctggctcaagagatcctcccacctcagcctcccaagtagctgaccacagagcaggacaggctgctttggtttgtgacctccaggcaggacggccatcctctccagaatgaagatcttcttgccagtgctgctggctgcccttctgggtgtggagcgagccagctcgctgatgtgcttctcctgcttgaaccagaagagcaatctgtactgcctgaagccgaccatctgctccgaccaggacaactactgcgtgactgtgtctgctagtgccggcattgggaatctcgtgacatttggccacagcctgagcaagacctgttccccggcctgccccatcccagaaggcgtcaatgttggtgtggcttccatgggcatcagctgctgccagagctttctgtgcaatttcagtgcggccgatggcgggctgcgggcaagcgtcaccctgctgggtgccgggctgctgctgagcctgctgccggccctgctgcggtttggcccctgaccgcccagaccctgtcccccgatcccccagctcaggaaggaaagcccagccctttctggatcccacagtgtatgggagcccctgactcctcacgtgcctgatctgtgcccttg

SEQ ID NO: 8354 - DNA, 835 bp, Homo sapiens; identical to SEQ ID NO: 6666

SEQ ID NO: 8355 - DNA, 954 bp, Homo sapiens
gcgcgagccgcgccggccccggtcgggcctccgaaaccatgaactttctgctgtcttgggtgcattggagccttgccttgctgctctacctccaccatgccaagtggtcccaggctgcacccatggcagaaggaggagggcagaatcatcacgaagtggtgaagttcatggatgtctatcagcgcagctactgccatccaatcgagaccctggtggacatcttccaggagtaccctgatgagatcgagtacatcttcaagccatcctgtgtgcccctgatgcgatgcgggggctgctgcaatgacgagggcctggagtgtgtgcccactgaggagtccaacatcaccatgcagattatgcggatcaaacctcaccaaggccagcacataggagagatgagcttcctacagcacaacaaatgtgaatgcagaccaaagaaagatagagcaagacaagaaaatccctgtgggccttgctcagagcggagaaagcatttgtttgtacaagatccgcagacgtgtaaatgttcctgcaaaaacacagactcgcgttgcaaggcgaggcagcttgagttaaacgaacgtacttgcagatgtgacaagccgaggcggtgagccgggcaggaggaaggagcctccctcagggtttcgggaaccagatctctcaccaggaaagactgatacagaacgatcgatacagaaaccacgctgccgccaccacaccatcaccatcgacagaacagtccttaatccagaaacctgaaatgaaggaagaggagactctgcgcagagcactttgggtccggagggcgagactccggcggaagcattcccgggcgggtgacccagcacggtccctcttggaattggattcgccattttatttttcttgctgctaaatcaccgagcccggaagattagagagttttatttctgggattcctgtagacacacc

SEQ ID NO: 8356 - DNA, 3293 bp, Homo sapiens
cgccaccgcactccagcctgggcgccagagtgagactccgtctcgaaaaaaaacaaaaacccagaaagactgaatatttggatggaagttttaccagaagcacaaatgccgttcacaggcacatgtatgcaacgaggaaagctaatttacaggcatcccattgaactgtgggaaatgctaggaaacttttaagaagcaaggaattataaggtaccgccaggcaggccctgtcatcgcggtgcaagtggagaatgagtatggctcattcaataaggataaaacatacatgccgtatctccacaaggccctgctgagaagagggattgtggagcttctcttgacctctgatggtgagaaacatgtgctgagtggccacaccaaaggagtgttggccgccatcaatttgcaaaaacttcaccaggatactttcaatcagcttcataaagtccagagagataagccccttctgattatggaatactgggtcggctggttcgacagatggggagataagcaccatgttaaagatgcaaaggaggttgaacatgctgtgtctgaattcatcaaatatgagatctccttcaatgtatatatgttccatggtggaaccaactttggtttcatgaacggggccacatatttcgggaagcactcgggcattgtcaccagctatggcaagtgtcgctggtgtagtagcctctccagcatgggcggtgctggggctttacagaggaggctccggaagcctgttctggcaccactgggttcttgacctataatctatgctgagtactgaagattttcctatctactttccttccttctgtatgttcataatgccccaacaggctgtcattgcagtagacagggctttccgggacttagagctccgcttcacacatctggtatactgccctgttggcttgaacctctgaagagaggcagggtaggaacggtgactgctgtaaaggcacagacctgcacggccgggcgatacagactgagcaaagaaaagagtacccgttgaaggggtgtccactcttttggcttccctgggccacactggaagaagaagaattgtcttgggccacacatgaaatacactaacactaatgatagctgatgagcttaaaaaaaaaacacaaaatgttttaagaaagtttatgaatttgtgttgggctgcattcaaagccatcctgggccgcctgtagcccatgagctgtgggttgaacaagtttgcattagaaagtgaagaagtgggggcaagcccagtgtcatggcttgacactggaagccagtggaaggtgcccaggaagagttgtggggaatgtccttagactggcatcacacacccacgtgggatggaaggtgtcttccttttgtctcactcacggtggccctggccatctcctgccagcggtgctgaaacagggcctcctgcagagactgcatggctggtgactggccctggtgtcttgcagactatgatgcagtgctcacggaggctggagattacacagaaaaatatctgaagcttcaaaaactctttcaatctgtctcaggtactcagcacccatttaacttacgggccagccctcctcatgtggagtctctgttctgtggaaaagtgaggaaggcgtgggtctcccttgtgggcagcagttacaccaagctcctgagaacaagggcaaccttaacttcgaaccctggggttaaaatctgtgtgattttttaaaatcagggtttctaagcattttataagcctcagtttcttcactgaagcataaagatagtaaccttggtctcctgtgatgactgcgaagattgagttactctttgtaaagctcttataccatggatgacatagtaacccccaatatgaaaggaaaagccatgctggataggcatggggggcttagagaaggcagtggtcatctcaggcactttttgccctgtgccccatctccattgcagcaactcccctgccccgagtacccaaacttcctcccaaggctgtgtatccccccgtgagaccgtcgctgtacctcccgctgtgggacgccctatcctacttaaatgagccagtcaggtcgcgtcagcccgtcaacatggagaaccttcccataaacaatgggagcggccagtcctacgggcttgtcctgtatgagaagtccatctgctccggaggccgcctccgtgcccacgctcatgacgtggcacaggtgtttttggatgagacaatgatagggattctgaatgagaataataaggacctgcacattcctgaactcagggaataactggatctgtcagcatcaataactcttccctggagggctttaccatctattccctggagatgaaaatgagcttctttgagaggctccgctctgccacctggaagcctgtcccagacagccaccagggcccggccttctactgtgggaccttgaaggctggcccttctcccaaggacaccttcctgagcctgctgaactggaattatggatttgtgttcatcaatggacgtaaccttgggcgatattggaatattgggcctcagaaaacactgtaccttcctggagtttggcttcatccagaagacaatgaggtcatcttgtttgagaagatgatgagtggctcagatatcaaatctacagacaagcccacgctgtaaaactgtgtctgaacatttttttttttttttgagatggagtctcactttgtcgcccaggctggagtgcagtggcacaatctctgctcactgcaagctcagcctctcgggttcacgccattctcctgcctcagcctccccagcagctgggactacaggtgcacgccaccacgcctggctaattttttgtatttttagtagagatggggtttcaccaagttagccaggatggtcccaatctcctgaccttgtgatctgctctcctcagcctcccaaagtactgggattacaggcgtgagccaccactcccggccgtgaacatattttttgggttgctggagttcatctataagtcatttttgaggaataagatttatgttaagactatcaaacacagtgttgcctacaatagcaaaaatgtgaaaataacaacaacaacaaaacagcagaggaattgttatgtattttgtagtctatctatatgatgcctatttttaggctttaaaaagtcttcaaaatctttaatgactgatttatctagttaaatgcttaatccttagcaggctcttattctttaattaaacgtgcctttgagtagatgtgaataaaataaaaacaa

SEQ ID NO: 8357 - DNA, 573 bp, Homo sapiens
actcacacacaatgtgccatcctgacaaggcttttacttctgataagctccaatgtgtgtttaatgaatacaaagccgcggtctgggtgccgcctcggccgcggccgctctcccgcgctcctttgccagaagattgatctctgggctggtgaacataatctctgtcccagtcagaaaaggagagaggaaattagcagagcgattggtggagaatgatatctgtcaaaagaaacacttggagagcactgagtttagtaataggtgactgccggaaaaaagggaactttgaatattgtcaagatcgtactgagaagcactccacaatgccagactcacctgtggatgtgaagacgcaatctaggctgactcctccaacaatgccacctcccccaactactcaaggagctccaagaaccagttcatttacaccgacaacgttaactaatggcacgagccattctcctacagccttgaatggcgccccctcaccacccaatggcttcagcaatgggccttcctcttcttcctcctcctctctggctaatcaacagctgcccccagcctgtggtgcca

SEQ ID NO: 8358 - DNA, 815 bp, Homo sapiens
ggggggattcaagtgcttagagatcgaagtctgccctgggtagggggagtcagacaattggaaagcctaggtagttatttggggaggggtctctacgccttggcgaagcgcacagctgcatctttttggcttgaggcctgaggccttgtcgagaagcttccgtgaaagggtgggccagccgggccacgagaaagaaagtgaataaatcaggaatataagtgggcggggggcccctgagaggggggtcgcaaagggtgagacatggccaccaggcgtttaaccgacgctttcttgttgttgcggaataattccatccaaaaccggcagctgttagccgagcaagtgagtagtcacatcacctccagccctctgcattcacgtagcattgctgcgcttgctgatgaccgtatggcactggtgtcaggcatcagcttagatccagaagcagcgattggtgtgacaaaacggccacctcctaagtgggtggatggagtggatgaaattcagtatgatgttggccggattaagcagaagatgaaagaattggccagccttcatgacaagcatttaaacagacccaccctggatgacagcagcgaagaggaacatgccattgagataactacccaagagatcactcaggcatgaagaatcgagaggaaagatcccagcattttttcgacacatcagtaccactaatggatgatggagacgataacactctttaccatcggggtacagtccttgacagaattgactataacgttgaacagtcctgtatcaaaactgaagatggtttgaaacagcttcacaag

SEQ ID NO: 8359 - DNA, 655 bp, Homo sapiens
caggagatcaccatcggccagctcattccacacctgcaagggtcagatcaagaaatccaaacctatactattgcagtgattaatgcgcttttcctgaaggctcctgatgagaggaggcaggagatggcgaatattttggctcagaagcaactgcgttccatcattttaacacatgtcatccgagcccagcgggccatcaacaatgagatggcgcaccagctgtatgttctacaagtgctcacctttaacctcctggaagacaggatgatgaccaaaatggacccccaggaccaggctcagagggacatcatatttgaacttcgaagaattgcttttgatgctgagtctgaacctaacaacagcagtggcagcatggagaaacgcaagtccatgtacacgcgagattataagaagcttgggttcattaatcatgtcaaccctgccatggacttcacgcagactccacctgggatgttggctctggacaacatgctgtactttgccaagcaccaccaagatgcctacatccgggtaagcaagaagccccttttcagatattgtgtgtttcctactcaatgttaatttcaaactcacaaatacggagggattacctttagatgagtgaccccatattttctgtctttcttagtaaact

SEQ ID NO: 8360 - DNA, 1153 bp, Homo sapiens; identical to SEQ ID NO: 6923

SEQ ID NO: 8361 - DNA, 364 bp, Homo sapiens
ttttttttttttgtatttttagtagagacggggtttcaccgtgttagccaggatggtctcgatctcctgaccttgtgatccacccacctaagcctaccaaaatgctgggattataggcctgagccaccacacccgacctcgtcgaacttgcgaggttatttctgttttgtgccatataataattattttgatggaaattgtcattgtcctttttcttcccactctgacaggctgtgtttgatgtggacaagaagaaagggttgactctgattgagctctgggaaggcctgacagtggatgacgtacagaagagtactgggtgtgattttgcagtttcaccaaaactcatgccaatgcagcagat

SEQ ID NO: 8362 - DNA, 1008 bp, Homo sapiens
tgtctgtcaaactccagcaattgctgacattgtaatcctggtcgatggttcatggagtattggaagattcaacttcagactggttcggcatttcttggaaaacctggttacagcattcgatgtgggctcagagaagacacgaattggggtgaaaaacgcggatgtgaatgagctgcaggagatcgcctctgaaccagacagcactcatgtgtacaatgttgccgaattcgatctgatgcacacagttgtggagagtctgaccaggactctctgctctagagtggaagaacaggacagagaaattaaagcctcagcccatgccatcactgggccgcctacggagttgattacttctgaagtcactgccagaagctttatggttaactggactcatgccccaggaaatgtggaaaaatacagagttgtgtattatcctaccaggggtggaaaaccagacgaggtggtggtagatggaactgtatcttccacagtgttgaaaaacttgatgtctttaactgaatatcagatagcagtctttgcaatctatgcccacactgctagtgaaggcctacggggaactgaaactacacttgctttaccgatggcttctgaccttctactgtacgacgtgactgagaacagcatgcgagtcaaatgggatgcagtgcctggggcctcaggttacctgatcctttatgctcctctaacagagggcctggctggggatgaaaaagagatgaaaattggagagacccacacagatattgaattgagtgggttgttgcccaatacagaatacacagtcacagtttatgccatgtttggagaagaggccagtgatcctgttacgggacaagaaacaacattggctttaagtccaccaagaaacctgagaatctccaatgttggctctaacagtgctcgattaacctgggacccaacttcaagacagatcaatggttatcgaattgtatataacaatgcagatgggactgaaatcaatgaggt

SEQ ID NO: 8363 - DNA, 1872 bp, Homo sapiens
gggttgataggtgcaacaaacgaccatggcacacatctacttatgtaacaaacctccacactctgcacctgtatcctggaactcaaaaaaaaaaaaaaagttaaaaggagttcttcagagtaaaggaaaatgatataggccagaaacttggctctacataaagaaataaagagcactgaaggaaaaaaaaaatgaatttgaggtacaagtagccagccgtagttcctgtccatgattctctagaaggctattttttaaggctgttgggcccaaaaattgaggcagctgggacctctcctgtattcagaaatgcttttctacctgatgggttaatcggtgtacatggcacctggttcctacaaatgaaatcttcaagttgcaaagagatttatgtgattgatctttcctggaattaagtgtgattggggatgagtgctgttcactcttcccagtatcttctcctttcctctcccttactgcccctccccaaacaataataaaaataagagaaagagaaagcaatgacaatctggatttataatgtcaaagtaagttcagagtaaaatgccttcttaggttttcattttaatgcctttactatgtgtgaaattgcctctttctctcttattacatttgaaattgccagaattaccgatcagcctatcaaccagcccgttctttattcaaggtgctgacctagctgaggaggaagagtgaccagtatacaggatttcttctaacattagaagaaatatgtgtgtgtgtgtgtgtgtgtgtgtgtgtattcattccttagaataagactgatacaaagaaggcagtttacttttgtagactactagaatatactgctttatgcattaattccatctgggatatgtgactgtacccaggccattacttaactattgtctgaacttgatgactatggaaaataatctctatgttcatgtctatatttttaagtgtattttcattaagttagtacttgacaaaagatattttctgggattagcctgcttgacctttgtgagtcaccagatacaaaattgagtgtgtcagggaaactattctgaaattaattggactgtgtatatattttttataccctctatcttccctgtggagaacaaaagttcttatgattggagctaggttctcacataccgtagaacatacattcaagtataaagggaccctaaaaataatgtgccacttgcaatgttatcagtgaagaaataaaagagaggtaaagtgatgtacaagggtcagtcacctcacacttagggcaatctgcgcacatggtagcccagtgctgagaattgtgcctgtggttccagcccatggcatgcatttgacctttgatgtagctgcattgcatactcttctccagtgttcgaaaagcagagtaagtcaacaggacagaagaaaactttcagtccgtcctctcattcctgtcattcccttgcaggccaacttgcccctgctgcagcgtgagctcctccactgcgcaagactggccaaacagaaccctgcccagtacctcgcccagcatgaacagctgcttctggatgccagcaccacctcacctgttgactcctcagagctgcttctcgatgtgaacgaaaacgggaagaggcgaactccagacagaaccaaagaaaatggctttgacagagagcctttgcactcagaacatccaagcaagcgaccatgcactattagcccaggccagcggtacagtccaaataacggcttatcctaccagcccaatggcctgcctcaccctaccccacctccacctcagcattaccgtttggatgatatggccattgcccaccactacagggactcctatcgacaccccagcca

SEQ ID NO: 8364 - DNA, 699 bp, Homo sapiens
aaattgacaaaccatcccagatgcaagtgaccgatgttcaggacaacagcattagtgtcaagtggctgccttcaagttcccctgttactggttacagagtaaccaccactcccaaaaatggaccaggaccaacaaaaactaaaactgcaggtccagatcaaacagaaatgactattgaaggcttgcagcccacagtggagtatgtggttagtgtctatgctcagaatccaagcggagagagtcagcctctggttcagactgcagtaaccatgccaagcgaggaatttacagagaaagaagttgtgaaaccaccataacattgatcgccctaaaggactggcattcactgatgtggatgtcgattccatcaaaattgcttgggaaagcccacaggggcaagtttccaggtacagggtgacctactcgagccctgaggatggaatccatgagctattccctgcacctgatggtgaagaagacactgcagagctgcaaggcctcagaccgggttctgagtacacagtcagtgtggttgccttgcacgatgatatggagagccagcccctgattggaacccagtccacagctattcctgcaccaactgacctgaagttcactcaggtcacacccacaagcctgagcgcccagtggacaccacccaatgttcagctcactggatatcgagtgcgggtgaccccc

SEQ ID NO: 8365 - DNA, 5923 bp, Homo sapiens
gctgccccgagcctttctggggaagaactccaggcgtgcggacgcaacagccgagaacattaggtgttgtggacaggagctgggaccaagatcttcggccagccccgcatcctcccgcatcttccagcaccgtcccgcaccctccgcatccttccccgggccaccacgcttcctatgtgacccgcctgggcaacgccgaacccagtcgcgcagcgctgcagtgaattttccccccaaactgcaataagccgccttccaaggccaagatgttcataaatataaagagcatcttatggatgtgttcaaccttaatagtaacccatgcgctacataaagtcaaagtgggaaaaagcccaccggtgaggggctccctctctggaaaagtcagcctaccttgtcatttttcaacgatgcctactttgccacccagttacaacaccagtgaatttctccgcatcaaatggtctaagattgaagtggacaaaaatggaaaagatttgaaagagactactgtccttgtggcccaaaatggaaatatcaagattggtcaggactacaaagggagagtgtctgtgcccacacatcccgaggctgtgggcgatgcctccctcactgtggtcaagctgctggcaagtgatgcgggtctttaccgctgtgacgtcatgtacgggattgaagacacacaagacacggtgtcactgactgtggatggggttgtgtttcactacagggcggcaaccagcaggtacacactgaattttgaggctgctcagaaggcttgtttggacgttggggcagtcatagcaactccagagcagctctttgctgcctatgaagatggatttgagcagtgtgacgcaggctggctggctgatcagactgtcagatatcccatccgggctcccagagtaggctgttatggagataagatgggaaaggcaggagtcaggacttatggattccgttctccccaggaaacttacgatgtgtattgttatgtggatcatctggatggtgatgtgttccacctcactgtccccagtaaattcaccttcgaggaggctgcaaaagagtgtgaaaaccaggatgccaggctggcaacagtgggggaactccaggcggcatggaggaacggctttgaccagtgcgattacgggtggctgtcggatgccagcgtgcgccaccctgtgactgtggccagggcccagtgtggaggtggtctacttggggtgagaaccctgtatcgttttgagaaccagacaggcttccctccccctgatagcagatttgatgcctactgctttaaacctaaagaggctacaaccatcgatttgagtatcctcgcagaaactgcatcacccagtttatccaaagaaccacaaatggtttctgatagaactacaccaatcatccctttagttgatgaattacctgtcattccaacagagttccctcccgtgggaaatattgtcagttttgaacagaaagccacagtccaacctcaggctatcacagatagtttagccaccaaattacccacacctactggcagtaccaagaagccctgggatatggatgactactcaccttctgcttcaggacctcttggaaagctagacatatcagaaattaaggaagaagtgctccagagtacaactggcgtctctcattatgctacggattcatgggatggtgtcgtggaagataaacaaacacaagaatcggttacacagattgaacaaatagaagtgggtcctttggtaacatctatggaaatcttaaagcacattccttccaaggaattccctgtaactgaaacaccattggtaactgcaagaatgatcctggaatccaaaactgaaaagaaaatggtaagcactgtttctgaattggtaaccacaggtcactatggattcaccttgggagaagaggatgatgaagacagaacacttacagttggatctgatgagagcaccttgatctttgaccaaattcctgaagtcattacggtgtcaaagacttcagaagacaccatccacactcatttagaagacttggagtcagtctcagcatccacaactgtttcccctttaattatgcctgataataatggatcatccatggatgactgggaagagagacaaactagtggtaggataacggaagagtttcttggcaaatatctgtctactacaccttttccatcacagcatcgtacagaaatagaattgtttccttattctggtgataaaatattagtagagggaatttccacagttatttatccttctctacaaacagaaatgacacatagaagagaaagaacagaaacactaataccagagatgagaacagatacttatacagatgaaatacaagaagagatcactaaaagtccatttatgggaaaaacagaagaagaagtcttctctgggatgaaactctctacatctctctcagagccaattcatgttacagagtcttctgtggaaatgaccaagtcttttgatttcccaacattgataacaaagttaagtgcagagccaacagaagtaagagatatggaggaagactttacagcaactccaggtactacaaaatatgatgaaaatattacaacagtgcttttggcccatggtactttaagtgttgaagcagccactgtatcaaaatggtcatgggatgaagataatacaacatccaagcctttagagtctacagaaccttcagcctcttcaaaattgccccctgccttactcacaactgtggggatgaatggaaaggataaagacatcccaagtttcactgaagatggagcagatgaatttactcttattccagatagtactcaaaagcagttagaggaggttactgatgaagacatagcagcccatggaaaattcacaattagatttcagccaactacatcaactggtattgcagaaaagtcaactttgagagattctacaactgaagaaaaagttccacctatcacaagcactgaaggccaagtttatgcaaccatggaaggaagtgctttgggtgaagtagaagatgtggacctctctaagccagtatctactgttccccaatttgcacacacttcagaggtggaaggattagcatttgttagttatagtagcacccaagagcctactacttatgtagactcttcccataccattcctctttctgtaattcccaagacagactggggagtgttagtaccttctgttccatcagaagatgaagttctaggtgaaccctctcaagacatacttgtcattgatcagactcgccttgaagcgactatttctccagaaactatgagaacaacaaaaatcacagagggaacaactcaggaagaattcccttggaaagaacagactgcagagaaaccagttcctgctctcagttctacagcttggactcccaaggaggcagtaacaccactggatgaacaagagggcgatggatcagcatatacagtctctgaagatgaattgttgacaggttctgagagggtcccagttttagaaacaactccagttggaaaaattgatcacagtgtgtcttatccaccaggtgctgtaactgagcacaaagtgaaaacagatgaagtggtaacactaacaccacgcattgggccaaaagtatctttaagtccagggcctgaacaaaaatatgaaacagaaggtagtagtacaacaggatttacatcatctttgagtccttttagtacccacattacccagcttatggaagaaaccactactgagaaaacatccctagaggatattgatttaggctcaggattatttgaaaagcccaaagccacagaactcatagaattttcaacaatcaaagtcacagttccaagtgatattaccactgccttcagttcagtagacagacttcacacaacttcagcattcaagccatcttccgcgatcactaagaaaccacctctcatcgacagggaacctggtgaagaaacaaccagtgacatggtaatcattggagaatcaacatctcatgttcctcccactacccttgaagatattgtagccaaggaaacagaaaccgatattgatagagagtatttcacgacttcaagtcctcctgctacacagccaacaagaccacccactgtggaagacaaagaggcctttggacctcaggcgctttctacgccacagcccccagcaagcacaaaatttcaccctgacattaatgtttatattattgaggtcagagaaaataagacaggacctgatcgctgcaaaatgaacccgtgccttaacggaggcacctgttatcctactgaaacttcctacgtatgcacctgtgtgccaggatacagcggagaccagtgtgaacttgattttgatgaatgtcactctaatccctgtcgtaatggagccacttgtgttgatggttttaacacattcaggtgcctctgccttccaagttatgttggtgcactttgtgagcaagataccgagacatgtgactatggctggcacaaattccaagggcagtgctacaaatactttgcccatcgacgcacatgggatgcagctgaacgggaatgccgtctgcagggtgcccatctcacaagcatcctgtctcacgaagaacaaatgtttgttaatcgtgtgggccatgattatcagtggataggcctcaatgacaagatgtttgagcatgacttccgttggactgatggcagcacactgcaatacgagaattggagacccaaccagccagacagcttcttttctgctggagaagactgtgttgtaatcatttggcatgagaatggccagtggaatgatgttccctgcaattaccatctcacctatacgtgcaagaaaggaacagtcgcttgcggccagccccctgttgtagaaaatgccaagacctttggaaagatgaaacctcgttatgaaatcaactccctgattagataccactgcaaagatggtttcattcaacgtcaccttccaactatccggtgcttaggaaatggaagatgggctatacctaaaattacctgcatgaacccatctgcataccaaaggacttattctatgaaatactttaaaaattcctcatcagcaaaggacaattcaataaatacatccaaacatgatcatcgttggagccggaggtggcaggagtcgaggcgctgatccctaaaatggcgaacatgtgttttcatcatttcagccaaagtcctaacttcctgtgcctttcctatcacctcgagaagtaattatcagttggtttggatttttggaccaccgttcagtcattttgggttgccgtgctcccaaaacattttaaatgaaagtattggcattcaaaaagacagcagacaaaatgaaagaaaatgagagcagaaagtaagcatttccagcctatctaatttctttagttttctatttgcctccagtgcagtccatttcctaatgtataccagcctactgtactatttaaaatgctcaatttcagcaccgatggccatgtaaataagatgatttaatgttgattttaatcctgtatataaaataaaaagtcacaatgagtttgggcatatttaatgatgattatggagccttagaggtctttaatcattggttcggctgcttttatgtagtttaggctggaaatggtttcacttgctctttgactgtcagcaagactgaagatggcttttcctggacagctagaaaacacaaaatcttgtaggtcattgcacctatctcagccataggtgcagtttgcttctacatgatgctaaaggctgcgaatgggatcctgatggaactaaggactccaatgtcgaactcttctttgctgcattcctttttcttcacttacaagaaaggcctgaatggaggacttttctgtaaccagg

SEQ ID NO: 8366 - DNA, 713 bp, Homo sapiens
ggaaatgatgacaatagttgctccccactttctcgctgtcctactgaatgtacttgcttggatacagtcgtccgatgtagcaacaagggtttgaaggtcttgccgaaaggtattccaagagatgtcacagagttgtatctggatggaaaccaatttacactggttcccaaggaactctccaactacaaacatttaacacttatagacttaagtaacaacagaataagcacgctttctaatcagagcttcagcaacatgacccagctcctcaccttaattcttagttacaaccgtctgagatgtattcctcctcgcacctttgatggattaaagtctcttcgattactttctctacatggaaatgacatttctgttgtgcctgaaggtgctttcaatgatctttctgcattatcacatctttctagtgtacatgtgcacaacgtgcaggtttgtttgtgccttgtcttttaccccctagatcataaagagctctgctttttcacttttcccacttcctcccctgtcacatcaaggacttaaatgttgatagagatgagatcaaatgactaaaaaacatcattttgctcatttttaatttggaagggtttgaatctgacatacatatgcaggtaacattcactacattctgattcttaaacggggcattaaaacttccacagtatcgagtattatgattctacacatatatttca

SEQ ID NO: 8367 - DNA, 556 bp, Homo sapiens
agatgcacaggaggagaagcaggagctgtcgggaagatcagaagccagtcatggatgaccagcgcgaccttatctccaacaatgagcaactgcccatgctgggccggcgccctggggccccggagagcaagtgcagccgcggagccctgtacacaggcttttccatcctggtgactctgctcctcgctggccaggccaccaccgcctacttcctgtaccagcagcagggccggctggacaaactgacagtcacctcccagaacctgcagctggagaacctgcgcatgaagcttcccaagcctcccaagcctgtgagcaagatgcgcatggccaccccgctgctgatgcaggcgctgcccatgggagccctgccccagggggtaaggacagccccagggtggtgggaggggcaaggttatcccgcctggatggaggacagtgccaaggggaggggcagggaagagagcccacctggggaggggtcctgactgctgcgggagggacagtgcctgcctcaggaagaatcgggctccccaggtgtggagggcacaggtga

SEQ ID NO: 8368 - DNA, 525 bp, Homo sapiens
tatgacgaaaatggagcagctcgctgggacttaatttccaatttgagaattcaacaaatagagatgtcaacaagtttcaagatgtttcttgataattggaatattcagacagctctttggctcaaaagggtgtgttatgaacgaacctccttcagtccaactatccagacgttcattctctctgccatttggcacggggtatacccaggatattatctaacgtttctaacaggggtgttaatgacattagcagcaagagctgtaagtatcaagaattttattttacaattcaatggtccacttgaactgttaaaaaggctgagtacatctctcttacaaggtagaccctctttccttggtcgtggtcagtattgtcctttccactagaagcgaggtgtgtactgcgtgcatgtttgctgagcgctcaccacgggctaggctccatgcccagttcctgtgaggagaaaacacgtttctatgtgcccggcaggtaggaggcactcacaaaatgttactttgtcttta

SEQ ID NO: 8369 - DNA, 2646 bp, Homo sapiens; identical to SEQ ID NO: 7554

SEQ ID NO: 8370 - DNA, 555 bp, Homo sapiens
gtagagggaatgagtcaggctccggctccacactggcacgtagtgggcggatcgcgccggcgctgagtaggaaggagcttcagccgccagcccggaacgcatcataggttagcttttcaagacacttcctgcatctctgacctgttgcacctctgttatcttggcacctctgttatcttagcagcaagcacctgcctcagctgacccttgagccataacccatgtaagtcactgcagggctgaacctctctttgagcctaacagtagaataataattatttttattgaatagtgttaatgtgtcaatgttgaaatgtgcctcagtgtgtcttcctcaaccacatccctatagaggatgttttcttaatagcaatgtgtttttgttttaagaaagtccacacaatttcaaatacacattttctttactaaagtttattgaccagttttgaagtgatccttgttttcagttaaactatctttaataatggtaaataacatattttgtaggttgttgtatatttaatattctctgcaagaacacataaggaacaatac

SEQ ID NO: 8371 - DNA, 1021 bp, Homo sapiens
gagatatattgatgagatatatttttctttttctgcagctaatacagactataagtgcagtagacaaagatgaccctttaggtggacagaaattttttttcagtttagctgctgtcaatccaaacttcacagtacaggataatgaagataatactgccagaatcttaaccagaaaaaatggattcaatagacatgaaatcagtacctatctcttgcctgtggtgatatcagacaatgattacccaattcagagcagcacaggcacactgaccattcgagtgtgtgcttgtgacagccaaggcaacatgcaatcctgcagtgctgaagccctgctcctccctgccggcctcagcactggggccttgatcgccatcctcctctgcatcatcattctactggttatagtagtactgtttgcagctctgaaaagacagcgaaaaaaagagcctctgatcttgtcaaaagaagatatcagagacaacattgtgagctataacgatgagggtggtggagaggaggacacccaggcctttgatatcggcaccctgaggaatcctgcagccattgaggaaaaaaagctccggcgagatattattccagaaacgttatttattcctcggaggactcctacagctccagataacacggacgtccgggatttcattaatgaaaggctaaaagagcatgatcttgaccccaccgcacccccctacgactcacttgcaacctatgcctatgaaggaaatgattccattgctgaatctctgagttcattagaatcaggtactactgaaggagaccaaaactacgattacctccgagaatggggccctcggtttaataagctagcagaaatgtatggtggtggggaaagtgacaaagactcttaacgtaggatatatgttctgttcaaacaagagaaagtaactctacccatgctgtctccacttcacaatatttgatattcaggagcattttcctgccagtcagcacaattttttttctcatttacttcttaatt

SEQ ID NO: 8372 - DNA, 665 bp, Homo sapiens
attatatttctgcctcattccttgtagggtttcttcagtgcccgtggtcatcgaccccttgacaagaagagagaagaggctcccagcctgaggcctgccccaccgcccatcagtggaggtggctatcgggctcgtccagccaaagcagctgccactcaaaagaaagtagaaagaaaagcccctgatgctggaggctgtcttcacgctgacccagacctgggggtgttgtgtcctacaggatgtcagttgcaagaggctttgctacaacaggaaaggccaatcagaaatagtgttgatgagttaaataacaatgtggaagctgtttcccagacctcctcttcttcctttcagtacatgtatttgctgaaagacctgtggcaaaagaggcagaagcaagtaaaagataatgaaaatgtagtcaatgagtactcctcagaactggaaaagcaccaattatatatagatgagactgtgaatagcaatatcccaactaaccttcgtgtgcttcgttcaatcctggaaaacctgagaagcaaaatacaaaagttagaatctgatgtctcagctcaaatggaatattgtcgcaccccatgcactgtcagttgcaatattcctgtggtgtctggcaaaggtaactgattcataaacatatttttagagagttc

SEQ ID NO: 8373 - DNA, 2453 bp, Homo sapiens
acttttcctccctctcccgctccgtctcacacgcaccctctgtttattttcctgcctccatctgggccctgctgatattgtaatcaccctgatgcacgttggcttctctcctctccctcctgcgctcacacactcactcacacacaatgtgccatcctgacaaggcttttacttctgataagctccaatgtgtgtttaatgaatacaaagccgcggtctgggtgccgcctcggccgcggccgctctcccgcgctcctttgccagaagctggcggagagaatttacatttaaagattagcagagtgagaaagagaaatctgccttttgttgtgtggggtgaggaggaggcatctacccctggccttgacgctatctcccatcacctctgctatccagacaggactcaccgagtatcaaatgataagaactgagcacactggatgaaataatacttgcactgggagcactaagaaaagattgatctctgggctggtgaacataatctctgtcccagtcagaaaaggagagaggaaattagcagagcgattggtggagaatgatatctgtcaaaagaaacacttggagagcactgagtttagtaataggtgactgccggaaaaaagggaactttgaatattgtcaagaacaggaggcatgagcccggaacgcgcttgcttttaggagacagccactttctgtgtggtacgctggattcaaggatgcctgatcgtactgagaagcactccacaatgccagactcacctgtggatgtgaagacgcaatctaggctgactcctccaacaatgccacctcccccaactactcaaggagctccaagaaccagttcatttacaccgacaacgttaactaatggcacgagccattctcctacagccttgaatggcgccccctcaccacccaatggcttcagcaatgggccttcctcttcttcctcctcctctctggctaatcaacagctgcccccagcctgtggtgccaggcaactcagcaagctgaaaaggttccttactaccctgcagcagtttggcaatgacatttcacccgagataggagaaagagttcgcaccctcgttctgggactagtgaactccactttgacaattgaagaatttcattccaaactgcaagaagctactaacttcccactgagaccttttgtcatcccatttttgaaggccaacttgcccctgctgcagcgtgagctcctccactgcgcaagactggccaaacagaaccctgcccagtacctcgcccagcatgaacagctgcttctggatgccagcaccacctcacctgttgactcctcagagctgcttctcgatgtgaacgaaaacgggaagaggcgaactccagacagaaccaaagaaaatggctttgacagagagcctttgcactcagaacatccaagcaagcgaccatgcactattagcccaggccagcggtacagtccaaataacggcttatcctaccagcccaatggcctgcctcaccctaccccacctccacctcagcattaccgtttggatgatatggccattgcccaccactacagggactcctatcgacaccccagccacagggacctcagggacagaaacagacctatggggttgcatggcacacgtcaagaagaaatgattgatcacagactaacagacagagaatgggcagaagagtggaaacatcttgaccatctgttaaactgcataatggacatggtagaaaaaacaaggcgatctctcaccgtactaaggcggtgtcaagaagcagaccgggaagaattgaattactggatccggcggtacagtgacgccgaggacttaaaaaaaggtggcggcagtagcagcagccactctaggcagcagagtcccgtcaacccagacccagttgcactagacgcgcatcgggaattccttcacaggcctgcgtctggatacgtgccagaggagatctggaagaaagctgaggaggccgtcaatgaggtgaagcgccaggcgatgacggagctgcagaaggccgtgtctgaggcggagcggaaagcccacgacatgatcacaacagagagggccaagatggagcgcacggtcgccgaggccaaacggcaggcggcggaggacgcactggcagttatcaatcagcaggaggattcaagcgagagttgctggaattgtggccgtaaagcgagtgaaacctgcagtggctgtaacacagcccgatactgtggctcattttgccagcacaaagactgggagaagcaccatcacatctgtggacagaccctgcaggcccagcagcagggagacacacctgcagtcagctcctctgtcacgcccaacagcggggctgggagcccgatggacacaccaccagcagccactccgaggtcaaccaccccgggaaccccttccaccatagagacaacccctcgctag

SEQ ID NO: 8374 - DNA, 476 bp, Homo sapiens
cggagggcagcactgtgaaatagataagtcaaaaacctgctatgaggggaatggtcacttttaccgaggaaaggccagcactgacaccatgggccggccctgcctgccctggaactctgccactgtccttcagcaaacgtaccatgcccacagatctgatgctcttcagctgggcctggggaaacataattactgcaggaacccagacaaccggaggcgaccctggtgctatgtgcaggtgggcctaaagctgcttgtccaagagtgcatggtgcatgactgcgcagatggatgaagagtgttgtttagggagcgatgggctgcaaaggtaaatagatggtaggggctataggtggagtaaaggctcagatttgcatggaagagaataagggccttccctggtagagatactttatggttcccctctctggcagactcccagtggacagataaatcttgatgcaaacgcctccctg

SEQ ID NO: 8375 - DNA, 561 bp, Homo sapiens
agcccagtccagcgctgcccgtccagtcctcgcccaagatttaaagcccgcaagttttgttcttgagaccagcgactttagctccgatgcgggaaggaaagccgacctccgatttggacatttaaagagctgggcttgaacttcgtgagtttcgctctaaactgcccttgaaatgaagctggacttggaggtaaagtcactgggaagctggcctggggcggggtttccccctcttctcgtattttagaaacggacagcggcagtgcagccctagtttgctgtggcatggaatattcacatgggagagccgcatgaggccgcccaccacgcttcctgaaggatgcccgtgtggaagaattttgacgtgccagtgtcctcgttctacagggtgttccattcttccgcaatctcagaaaaatgggactaaaagaaactattttgtaaaataagaagacttccatttttaatgaccaacatgtattaagatggacacctactctacgaaacacgaagttctatggtctcgaagaagcccgtgcctgtttaaaactgatcctaact

SEQ ID NO: 8376 - DNA, 874 bp, Homo sapiens
ggctgaccgcctacgtggtcaaggtcttctctctggctgtcaacctcatcgccatcgactcccaagtcctctgcggggctgttaaatggctgatcctggagaagcagaagcccgacggggtcttccaggaggatgcgcccgtgatacaccaagaaatgattggtggattacggaacaacaacgagaaagacatggccctcacggcctttgttctcatctcgctgcaggaggctaaagatatttgcgaggagcaggtcaacagcctgccaggcagcatcactaaagcaggagacttccttgaagccaactacatgaacctacagagatcctacactgtggccattgctggctatgctctggcccagatgggcaggctgaaggggcctcttcttaacaaatttctgaccacagccaaaggtgagggttggcctggaggggtgaagggagatgcatggctgaagttcagggcgggagatactgagctgggatgcatggcttttagctgagctgggacagatgaccctaagccaagctgagatggatagtcctaaggtatcaagctgggatgcataaccctgagctgagctgggatgcacggctctaagttttcgcaggtcctcattgtaaaccacacgagaaagtttgttgcgtcatttattcaacaaatgcgtattaagcattcatttcaaagggagaagtgagagttgatgaaacaagagaggtaaggcaggagccaagtaattgagagcctcgaatgtcagccaggacacccaaacaccaggaagtctagcatgcatctctttctgagctttctctgagccatccccaggctggacagagcagtgagcactggggatggggtatcttctttgca

SEQ ID NO: 8377 - DNA, 5127 bp, Homo sapiens
agcatacatctctaattttattattttggtcttttcgttggattttccctttcttctttttttcgggttatcgctcagttttgagcagaggtttacattttttaaaaatttgctttccagcccgccttgatcttctaagtgcgagttcatcgtctgagaaaaaaaaaaatctctggaaagcatccaacggagtggaagcagcatgaaggaagagccgctgggcagcggcatgaacgcggtgcggacgtggatgcagggcgccggggtgctggacgccaacacggcggcgcagagcggggtgggtctggcccgggctcactttgagaagcagccgccttccaatctgcggaaatccaacttcttccacttcgtcctggccctctacgacagacagggccagcccgtggagatcgagaggacagcgtttgtggggttcgtggagaaggaaaaagaagccaacagcgaaaagaccaataacggaattcactaccggcttcagcttctctacagcaatgggataaggacggagcaggatttctacgtgcgcctcattgactccatgacaaaacaagccatagtgtatgaaggccaagacaagaacccagaaatgtgccgagtcttgctcacacatgagatcatgtgcagccgctgttgtgacaagaaaagctgtggcaaccgaaatgagactccctcagatccagtgataattgacaggttcttcttgaaatttttcctcaaatgtaaccaaaattgcctaaagaatgcgggaaacccacgtgacatgcggagattccaggtcgtggtgtctacgacagtcaatgtggatggccatgtcctggcagtctctgataacatgtttgtccataataattccaagcatgggcggagggctcggaggcttgacccctcggaaggtacgccctcttatctggaacatgctactccctgtatcaaagccatcagcccgagtgaaggatggacgacgggaggtgcgactgtgatcatcataggggacaatttctttgatgggttacaggtcatattcggtaccatgctggtctggagtgagttgatcactcctcatgccatccgtgtgcagacccctcctcggcacatccctggtgttgtggaagtcacactgtcctacaaatctaagcagttctgcaaaggaacaccaggcagattcatttatacagcgctcaacgaacccaccatcgattatggtttccagaggttacagaaggtcattcctcggcaccctggtgaccctgagcgtttgccaaaggaagtaatactcaaaagggctgcggatctggtagaagcactgtatgggatgccacacaacaaccaggaaatcattctgaagagagcggccgacattgccgaggccctgtacagtgttccccgcaaccacaaccaactcccggcccttgctaacacctcggtccacgcagggatgatgggcgtgaattcgttcagtggacaactggccgtgaatgtctccgaggcatcacaagccaccaatcagggtttcacccgcaactcaagcagcgtatcaccacacgggtacgtgccgagcaccactccccagcagaccaactataactccgtcaccacgagcatgaacggatacggctctgccgcaatgtccaatttgggcggctcccccaccttcctcaacggctcagctgccaactccccctatgccatagtgccatccagccccaccatggcctcctccacaagcctcccctccaactgcagcagctcctcgggcatcttctccttctcaccagccaacatggtctcagccgtgaaacagaagagtgctttcgcaccagtcgtcagaccccagacctccccacctcccacctgcaccagcaccaacgggaacagcctgcaagcgatatctggcatgattgttcctcctatgtgaaagaattgccttgaagaattgtattaatgaagaggttggattctgctacagagagtaatctgatacaagtcccagagtggaacttttaactcaggcctttttaagaggaatcacaataactgcagatttttaaacaaacaaaatcaccgaccttgcaaatactgaaattggaagagggatctgcaagtgcagggtgttggttaaagttgtacctcccaagtatttgggggatatatttattctgtattgacaaaagcaaatccactttttctttttcttttttttttttaagcttaattctgcaatcatttgtcttttataaaccgtaaagctctatacaagggacactataaataagactccatgttttaatttatgatgtttttaaagctgtgtaaaggaagaatgaagtggtgatatttacaaaaaagtaaaaaaaaaaaaaaagaaaaaaaggaaaaaaaaaaaagcttgtatgggacagaataggaatgccagttagattttttagaaaaactaagggtcggcttttgcgccttaaagcatatcaaatggtagttagctcagacagtgcattttcaatatctaacttaacatgccaccccttagcagtgcaagcttatttatctcttttgtattgttgtcttaagcaactgtgtaaataaatgcagcctggaaagttaaaacgcgatgtaagtgatcacatttttccctctactcgaaaatccagtgcctctagacagattgttaaaactgcatatttaaatctgatctcattctctccttttacttaagtcagtttcttctgaagccgatggcctctcgagagcttggtggcacacatactgtgtgagaatctcctttgagacttcatggaacagggtccaggcacagaattccacactctgccctccagttaacaagccaaaacctcacgtacgctcccccatttgcaagtttaaagtttactcgtcctaaatgcagacttcatacctatcttccaaaagttgataaaagcaacgtggcaggtattttcgattttcccattccagatactgcctctatcagtcgacccttaccatttgtaacataatagattgaaacaacaggttaagtgctttggaattaagagttaaagggaaccgggggtggagaaaggaaaagaaggttgagacctccaaaacatagttttctgttctatgggaatttttgctctcattatctgggaagtgttcttaaaaataagaattaatagcaaagatgcagcaaagctctgaggatgcatttgcctgatatttttttctttgctcttgtgtttttgtatgtagttataaatactgtagattttttttttgtgattttttgccaaagttgttgttctatttatacattttaatgtcttaagacattttttcaatatcacaaaaagattttactgcgtattttgcaaagaaaaaaagctcactacctttagcttgcacatacttgcaaagttaattaaaaggctttttgttttaaaggggattttgtaaaatatccatataaataatgtatttatctttcgaatttgtacattgcttttcccttcttcctcttccttccacccccaatttattttattgtgtatgtttgctacgtgaaaagtgcgtatttgtttggtcacctacacttgtattagctgtttcaatgtgatttttaaacatttcatttatagttatttttagtattgttataaaccatgcttcagtttttttaatttccacccaaaagtcattgtctatttttgtattatttgtaagttaagaagttttttccaatatatggcaaaaaaaaaaaaatagtagcatattattcttgtagtatttagttcagtagatttaaaaaaaaatgtatcctttgctttggaagcttacaaaacaaccctaatgctgttttactctattaatatgcatggaatctctccctttggagtgacgcattttgtgcattaaattctagggagaaacttcatagaaatcaatgaacatactttctttcttaagtctgcttgtatatttcctctgtctttcacataaatataaaccagcagattggatgccttaacaatgcaaatcatattcatttcacttgtacattgtaactgtgcaccagaactgtcagtcatcactaacattctaagaaaaaagaaaaagaaaaaaagaaaaaaaaaaaaacaaagaaatcgaaaagcacaaaagaactgttttgttaccttaagacaatgtaactttttctagtagagcaagaaatcatttacaacaatgctgcaactgtgcatgcccccatatggattttgcaatggttttcactaggctgtcaagagtgcgatttttatgggttggggtgggtgggggaggggagttgtgggagggtaggggagggaggaaagctgtttttcatggtgagaaataataatgatgactaataataataaaaaaaactggaaaatgtaagcaaggtggacgcattgcttctcggtactcagaaaggttatctgaatttgcgtggtaagcgctggcctgaagatgtacacaagttaaagccatattttatctggtgagccccttaactgtttctgaaggaatgaacggtcagccgggaaggtgtccggcttagaccttgacaacagacactacccatctgtcagccatgtgcagtggttagaactcttcttgaaagtccaaagagcctttaaaatgtgtataatttgtgttttgttgcttctatttctattgattagatgaaaagacattctggccctctgatcctctttcttctccacaaaagttttacaaataaaagatgttcccctaaatacagaatatggctttaagaagaaaatgaaatgaagaattaaattaagatttcagtgttgggggaaaaaatacagcttctggatgactggattgcataacattgccctggcctcacattgtactaggatgcagcttaaatgaagtcatctctaaatctactaacctttcaccttcttatcaaaactttttgaatagacacacactgtacagttcaattgttagagaacctaactactgtagagattgttaaattttttttttttttttgcaaaaattcaagctgtaaaaacttttcaactttcacaatatttaattaaagttacttcctgtctgtga

SEQ ID NO: 8378 - DNA, 384 bp, Homo sapiens
aaagcaatctgctggatgatttgaaaagtgtaatgaaaacaaatgacattgttcgatacagggtgtatgagagccacctgtatagaaatggtgacatcactggcatatactcatcatgggcgacaatatcttgctcaagaaggagtaattgaccaaatttctaatataattgttggggcagattcagaccctttctctagcttctatctgccaggtaaggaacactgatgcctatggaaatgatggtgcgtgttttatttctgagttatctctgacatcagggggttggggtagggagtggacagggattgttttcctttagagctgatttccttaatgagctgatttcgtttagaagatatctagagcaaccaagttcaaatt

SEQ ID NO: 8379 - DNA, 796 bp, Homo sapiens
atgaatccactcctgatccttgcctttgtgggagctgctgttgctgtcccctttgatgatgatgacaagatcgttgggggctacacctgtgaggagaattctgtcccctaccaggtgtccttgaattctggctcccacttctgcggtggctccctcatcagcgaacagtgggtggtgtcagcaggtcactgctacaagccccacatccaggtgagactgggagagcacaatatcgaagtcctggaggggaatgagcagttcatcaatgcagccaagatcatccgccaccccaaatacaacaggattattctgaacaatgacatcatgctgatcaagctctccacacctgccgtcatcaatgcccatgtgtccaccatctctctgcccactgcccctccagctgctggcaccgagtgccttatctccggctggggcaataccctgagctctggggccgactacccagatgagctgcagtgcctggacgctcctgtgctgacccaggctaagtgtaaagcctcctaccctttaaagattaccagcaacatgttctgtgtgggcttccttgagggaggcaaggattcctgccagggtgactctggtggccctgtggtctgcaatggacagcttcaaggaattgtctcctggggctatggctgtgcccagaagagaaggcctggagtctacaccaaggtctacaactatgtggactggattaaggacaccatagctgccaacagctaaagcccctggtcactctgcagtctctataccaataaaataaccctgttctcac

SEQ ID NO: 8380 - DNA, 627 bp, Homo sapiens
atagccgttgcgagggggaactccgcctcggagagagagtgttagtggtaggacagagactgggcaccattaggttctttgggacaacaaacttcgctccaggatattggtatggtatagagcttgaaaaaccccatggcaagaatgatggttcagttggaggtgtgcagtattttagctgttctccaagatatggaatatttgctcccccatccagggtgcaaagagtaacagattccctggataccctttcagaaatttcttcaaataaacagaaccattcttatcctggtaagactacacagttttgtgttcctaatcaatatttctttgctttcatttattgaaaaatttttattatgaggtattgtatacaaaagggtctataaactgtatttgtatagtttttgtaataatagaacaaacatctgttacctgtcccctggctgaagaagatgataacctgacctgtagaaacccctgagtaccccatcccatctcatctgccttgctcttcatataccccatcctcaggtggaggagtcttgaattgtacattaattattcccttgattctctttatttttgtcacccatatatagatatatcaataaataatatgtgttc

SEQ ID NO: 8381 - DNA, 818 bp, Homo sapiens
gccccgccccgccccgcccggctgctccatggcgctgtgcgaggccgcgggctgcgggagtgccctgctctggcctcgcttgttgctcttcggggactccatcacccaggttacaataccaggtgggccaaaattatccttccaagattaatcaggaaaggaaacagtttggacatcccagtagcagttacaattttctttggggccaatgacagtgcactaaaagatgagaatcccaagcagcacattcccctggaggagtacgctgcgaacctaaagagcatggtgcagtacctgaagtccgtggacatccctgagaatcgagtcattctcatcacgccgaccccactttgtgaaacagcctgggaagaacagtgcatcatacaaggttgcaaactaaatcgcctgaactctgttgttggtgaatatgccaatgcgtgtttacaagtggcccaagactgtgggactgacgtacttgacctgtggaccctgatgcaggacagccaggacttctcatcttatttatcagatggactacatttgtctccaaaggggaatgaatttttgttctcgcatctctggcctttgatagagaaaaaggtctcttctctacctttgctgcttccttactggcgggatgtagcagaagcaaaacctgaattaagtctgctgggagatggagaccattagccaatcacaggagacccaaatctgcttgttatctacagaactcaaagttgtcaatacgtagaggtacgcttttttcctcaggcttaaacctttgccactgatattaataataaaagtattagatgatt

SEQ ID NO: 8382 - DNA, 3918 bp, Homo sapiens
atggcgagcgactccccggctcgaagcctggatgaaatagatctctcggctctgagggaccccgcagggatctttgaattggtggaacttgttggaaatggaacatacgggcaagtttataagggtcgtcatgtcaaaacgggccagcttgcagccatcaaggttatggatgtcacaggggatgaagaggaagaaatcaaacaagaaattaacatgttgaagaaatattctcatcaccggaatattgctacatactatggtgcttttatcaaaaagaacccaccaggcatggatgaccaactttggttggtgatggagttttgtggtgctggctctgtcaccgacctgatcaagaacacaaaaggtaacacgttgaaagaggagtggattgcatacatctgcagggaaatcttacgggggctgagtcacctgcaccagcataaagtgattcatcgagatattaaagggcaaaatgtcttgctgactgaaaatgcagaagttaaactagtggactttggagtcagtgctcagcttgatcgaacagtgggcaggaggaatactttcattggaactccctactggatggcaccagaagttattgcctgtgatgaaaacccagatgccacatatgatttcaagagtgacttgtggtctttgggtatcaccgccattgaaatggcagaaggtgctccccctctctgtgacatgcaccccatgagagctctcttcctcatcccccggaacccagcgcctcggctgaagtctaagaagtggtcaaaaaaattccagtcatttattgagagctgcttggtaaagaatcacagccagcgaccagcaacagaacaattgatgaagcatccatttatacgagaccaacctaatgagcgacaggtccgcattcaactcaaggaccatattgatagaacaaagaagaagcgaggagaaaaagatgagacagagtatgagtacagtggaagtgaggaagaagaggaggagaatgactcaggagagcccagctccatcctgaatctgccaggggagtcgacgctgcggagggactttctgaggctgcagctggccaacaaggagcgttctgaggccctacggaggcagcagctggagcagcagcagcgggagaatgaggagcacaagcggcagctgctggccgagcgtcagaagcgcatcgaggagcagaaagagcagaggcggcggctggaggagcaacaaaggcgagagaaggagctgcggaagcagcaggagagggagcagcgccggcactatgaggagcagatgcgccgggaggaggagaggaggcgtgcggagcatgaacaggaatacatcaggcgacagttagaggaggagcagagacagttagagatcttgcagcagcagctactgcatgaacaagctctacttctggaatataagcgcaaacaattggaagaacagagacaagcagaaagactgcagaggcagctaaagcaagaaagagactacttagtttcccttcagcatcagcggcaggagcagaggcctgtggagaagaagccactgtaccattacaaagaaggaatgagtcctagtgagaagccagcatgggccaaggagatcccacatctggtagctgtaaaatcccagggacctgccttgaccgcctcccagtcagtgcacgagcagcccacaaagggcctctctgggtttcaggaggctctgaacgtgacctcccaccgcgtggagatgccacgccagaactcagatcccacctcggaaaatcctcctctccccactcgcattgaaaagtttgaccgaagctcttggttacgacaggaagaagacattccaccaaaggtgcctcaaagaacaacttctatatccccagcattagccagaaagaattctcctgggaatggtagtgctctgggacccagactaggatctcaacccatcagagcaagcaaccctgatctccggagaactgagcccatcttggagagccccttgcagaggaccagcagtggcagttcctccagctccagcacccctagctcccagcccagctcccaaggaggctcccagcctggatcacaagcaggatccagtgaacgcaccagagttcgagccaacagtaagtcagaaggatcacctgtgctcccccatgagcctgcgaaggtgaaaccagaagaatccagggacattacccggcccagtcgaccagctagctacaaaaaagctatagatgaggatctgacggcattagccaaagaactaagagaactccggattgaagaaacaaaccgcccaatgaagaaggtgactgattactcctcctccagtgaggagtcagaaagtagcgaggaagaggaggaagatggagagagcgagacccatgatgggacagtggctgtcagcgacatacccagactgataccaacaggagctccaggcagcaacgagcagtacaatgtgggaatggtggggacgcatgggctggagacctctcatgcggacagtttcagcggcagtatttcaagagaaggaaccttgatgattagagagacgtctggagagaagaagcgatctggccacagtgacagcaatggctttgctggccacatcaacctccctgacctggtgcagcagagccattctccagctggaaccccgactgagggactggggcgcgtctcaacccattcccaggagatggactctgggactgaatatggcatggggagcagcaccaaagcctccttcaccccctttgtggaccccagagtataccagacgtctcccactgatgaagatgaagaggatgaggaatcatcagccgcagctctgtttactagcgaacttcttaggcaagaacaggccaaactcaatgaagcaagaaagatttcggtggtaaatgtaaacccaaccaacattcggcctcatagcgacacaccagaaatcagaaaatacaagaaacgattcaactcagaaatactttgtgcagctctgtggggtgtaaaccttctggtggggactgaaaatggcctgatgcttttggaccgaagtgggcaaggcaaagtctataatctgatcaaccggaggcgatttcagcagatggatgtgctagagggactgaatgtccttgtgacaatttcaggaaagaagaataagctacgagtttactatctttcatggttaagaaacagaatactacataatgacccagaagtagaaaagaaacaaggctggatcactgttggggacttggaaggctgtatacattataaagttgttaaatatgaaaggatcaaatttttggtgattgccttaaagaatgctgtggaaatatatgcttgggctcctaaaccgtatcataaattcatggcatttaagtcttttgcagatctccagcacaagcctctgctagttgatctcacggtagaagaaggtcaaagattaaaggttatttttggttcacacactggtttccatgtaattgatgttgattcaggaaactcttatgatatctacataccatctcatattcagggcaatatcactcctcatgctattgtcatcttgcctaaaacagatggaatggaaatgcttgtttgctatgaggatgagggggtgtatgtaaacacctatggccggataactaaggatgtggtgctccaatggggagaaatgcccacgtctgtggcctacattcattccaatcagataatgggctggggcgagaaagctattgagatccggtcagtggaaacaggacatttggatggagtatttatgcataagcgagctcaaaggttaaagtttctatgtgaaagaaatgataaggtattttttgcatccgtgcgatctggaggaagtagccaagtgtttttcatgaccctcaacagaaattccatgatgaactggtaa

SEQ ID NO: 8383 - DNA, 528 bp, Homo sapiens
tgtggatggttgctgagctgcgcattcggcattgggcttgctttgtttcctgccaggcccagcattttcttctaccagatcggcaggcttgtgggcttcttcctaggtccctcccctgcactctgaataggaaagctggaagctgtgctttagagaagctttaagacgccgaaagaaaccagaagaaaagcattttgacttgttgatgtcaatttggaacagctgaaaaaatacaggaaaataagataaatacgtacatgttgagggtggggacaaaatgaaggttctgaaccagctgccggcttacagtagccatataagcaacagcagcaatgcaccaacctggtggcatggaatattcacatgggagagccgcatgaggccgcccaccacgcttcctgaaggatgcccgtgtggaagaattttgacgtgccagtgtcctcgttctacagggtgttccattcttccgcaatctcagaaaaatgggactaaaagaaactattttgtaaaataagaagacttccattt

SEQ ID NO: 8384 - DNA, 587 bp, Homo sapiens
atattcacattccctaagaggacgttctggactctcgggcagagctttgtgagagaaacaaggctggcttcaagtgatctgcaaccagagtaattgggatttgacaaggactgtgaaaggctgactctccctgttctctttcatgctggcaccgggcagagtgtgggaactactgcctcaatacgatcatagaagccattgagatcccgcagtttatcggccgcagttacctgacgtatgacaacccagatatcttgaagagggtgtcaggatcaagatcaaatgtgttcatgaggtttaaaacaactgccaaggatggccttttgctgtggaggggagacagccccatgagacccaacagcgacttcatttccttgggccttcgggatggagccctcgtgttcaggtaaccccctctccatctgccttcagcagcaccttgcgattttctcagacattgcagatcatgccagagtgattcagaagggagccagaacacagtctgctggaattggctgaagcctgaagcttcaaggcttattggaagctcctggtctttctttccaacattcatcttatagagcagc

SEQ ID NO: 8385 - DNA, 548 bp, Homo sapiens
aaatgagaggtaaaataagtacatttgaaagggaaagcactgtattgagaacagatattatatacaaatgaggcaggggaataaaagtaaatccgggggagacaggcagtaaattatttctttgacagcaaaatgttgactttaaattttgggcccctgggcacaactgtagggaaccagttaattattttggagtactgtactatttcatgactattctgtgatctgggtgttaatgggccaggtgctatggtgtacactgaagactgggaggcccacatttagggaagtgaaaacttagttagagatgtggaattagcacacaagaaagatatcaacacattcagaaagctgtattcatgatttacagtggagcatattactgctgttgcaagaaacagttcttcctctttcattttcctgcagttccaaatgaccttccacctgtttattgctgcatttgtgggggctgcagctacactggtttccctgctcaccttcatgattgctgccacttacaactttgccgtccttaaactcatgggccg

SEQ ID NO: 8386 - DNA, 2469 bp, Homo sapiens
gactttgctgctggctgcccattggcctatcctccaccctctgctctcctgagaagtcaagtgtggattttgtctgctagttacctttagcccagtgggcagcagcgtggggctcggcatgtgacttgtgccctgagagaccttggtaggctgggggagcgcagctgagccctgctaacccccgcccacttccaggctcattgccctcttctgtgtctgcagtggggtgtcacctagtagtcagctgttggtggcacagatgaattcagcttagagaactatcaacacaggacaatgcaagcccatgagctgttccggtattttcgaatgccagagctggttgacttccgacagtacgtgcgtactcttccgaccaacacgcttatgggcttcggagcttttgcagcactcaccaccttctggtacgccacgagacccaaacccctgaagccgccatgcgacctctccatgcagtcagtggaagtggcgggtagtggtggtgcacgaagatccgcactacttgacagcgacgagcccttggtgtatttctatgatgatgtcacaacattatacgaaggtttccagaggggaatacaggtgtcaaataatggcccttgtttaggctctcggaaaccagaccaaccctatgaatggctttcatataaacaggttgcagaattgtcggagtgcataggctcagcactgatccagaagggcttcaagactgccccagatcagttcattggcatctttgctcaaaatagacctgagtgggtgattattgaacaaggatgctttgcttattcgatggtgatcgttccactttatgatacccttggaaatgaagccatcacgtacatagtcaacaaagctgaactctctctggtttttgttgacaagccagagaaggccaaactcttattagagggtgtagaaaataagttaataccaggccttaaaatcatagttgtcatggatgcctacggcagtgaactggtggaacgaggccagaggtgtggggtggaagtcaccagcatgaaggcgatggaggacctgggaagagccaacagacggaagcccaagcctccagcacctgaagatcttgcagtaatttgtttcacaagtggaactacaggcaaccccaaaggagcaatggtcactcaccgaaacatagtgagcgattgttcagcttttgtgaaagcaacagagaaagcacttcccttgagtgccagtgacacacacatttcatatttaccacttgctcacatttatgaacagttattgaagtgtgtaatgctgtgtcatggagctaaaatcggatttttccaaggagatatcaggctgctcatggatgacctcaaggtgcttcaacccactgtcttccccgtggttccaagactgctgaaccggatgtttgaccgaattttcggacaagcaaacaccacgctgaagcgatggctcttggactttgcctccaagaggaaagaagcagagcttcgcagcggcatcatcagaaacaacagcctgtgggaccggctgatcttccacaaagtacagtcgagcctgggcggaagagtccggctgatggtgacaggagccgccccggtgtctgccactgtgctgacgttcctcagagcagccctgggctgtcagttttatgaaggatacggacagacagagtgcactgccgggtgctgcctgaccatgcctggagactggaccgcaggccatgttggggccccgatgccgtgcaatttgataaaacttgttgatgtggaagaaatgaattacatggctgccgagggcgagggcgaggtgtgtgtgaaagggccaaatgtatttcagggctacttgaaggacccagcgaaaacagcagaagctttggacaaagacggctggttacacacaggggacattggaaaatggttaccaaatggcaccttgaaaattatcgaccggaaaaagcacatatttaagctggcacaaggagaatacatagcccctgaaaagattgaaaatatctacatgcgaagtgagcctgttgctcaggtgtttgtccacggagaaagcctgcaggcatttctcattgcaattgtggtaccagatgttgagacattatgttcctgggcccaaaagagaggatttgaagggtcgtttgaggaactgtgcagaaataaggatgtcaaaaaagctatcctcgaagatatggtgagacttgggaaggattctggtctgaaaccatttgaacaggtcaaaggcatcacattgcaccctgaattattttctatcgacaatggccttctgactccaacaatgaaggcgaaaaggccagagctgcggaactatttcaggtcgcagatagatgacctctattccactatcaaggtttagtgtgaagaagaaagctcagaggaaatggcacagttccacaatctcttctcctgctgatggccttcatgttgttaattt

SEQ ID NO: 8387 - DNA, 1839 bp, Homo sapiens
ggctgtttgcagtggggaaaccgaggcagctcctgctccccctagttcttccgctcctgtgaggtggctgctgtttcttttcctcttgccccggatgcctcggtgcggctgcactgagagcgcgcgggctcgcgagccccgcggggttctgcgggaacccgggggcgcctgggccggcgggtctttgtgcgagccctgccctcccattcgcgggcggcgcgcgaggggggtcggcgcagagacgcccagagccctggggtgctcaggcgccgctacgcgtgcatcccctctgctcggcagttctgcgcttttgtcctaatgagcgcggactagatggcttgattttcaagataatgatcaacccagctgtgctatgcgctctttctgcactgacctgcgggtacttcgaacttcgacagtccctcctcaggccctagtccagaggtgacgtgtctgtgggaatgtttaaggcaggaaggagacgagcaattttgtttttaagtatctccctctcactagtatctccctgactttttcatttagaagctgaagaattttcttatggcataagatatagttgtatcgagtgtgtacttagcaaaacaaaaacttgttagtatttctgcccttgacctattgaatggaaaatcaagaatgagctaaggtgttatatactcagtgttcaacttgtatacttaagtttgtagtgtttttatttgctggcatcacctgactgggacagttgtaacgaattatccacatgggataagaagagtgtattctataaaaacaactctgatgttttggtatatattttaattgttgattagttggagtcctcttgatcttgaactgttgagccccagttctcaaagaatgggaagttaggaaactaagatatgaaatacaattatttagcaaaaagtgcaaaccattctgttactctttcaagccattgaatagtttgagtacattgtttgaattttagttttgaaaaagtgattaattggccatttgatcatcaattaatagcggtatatattacacctgccattgtttttaaatgcctaattaaactgtcaaaacagacacaatgaaatgatagatacataatttgagatttgatcagttgtataaactttttaaattttaaaattcagtttaaggtcattaagcttgtcttgtatgtttccctcctccaggaaaaaaaaatgtttatttctttgtgggagttcttctatgggcacttttttcgattttggatgaaatggctattacgacagatgactgggaagtgtgaattgcagcgaatatttgatacctatgtaggtgcacaaaggacacacaggatagaaaattccttgacatactccaagaataaggtaggataacataaaggtggtaactctagaaaacttaacgtggacatattttttcttaaaaaaaaaaaagtgccctgctagaagagtgttttctatagtgagcattgagtgaaattttccccgtttagaggtaatattctgttttcaaacatttctctatatatgtgtttttcgtgtgtatttcaaagaaaatacttgaataatttgtcctgtcctgaggttttatttgtttattttgctttaagagttgatagcttttaggaaagcagggccttaggaggaaagtcgtcttttagactgtgtcctcaggatagattatatgagagaaaagcaacttaggatagagaaaaccctgggttgtgtaccttttgagctaaaataagtcataattcatgctatgtattagtcagcttttgctgtgtaacaaactataataaaatctcaggggcataaaacg

SEQ ID NO: 8388 - DNA, 1023 bp, Homo sapiens
atggctgttagtgtcacaccaattcgggacacaaaatggctaacactggaagtatgtagagagttccagagggggacttgctcacggccagacacggaatgtaaatttgcacatccttcgaaaagctgccaagttgaaaatggacgagtaatcgcctgctttgattcattgaaaggccgttgctccagggagaactgcaaatatcttcatccacccccacatttaaaaacgcagttggagataaatggacgcaataacttgattcagcagaagaacatggccatgttggcccagcaaatgcaactagccaatgccatgatgcctggtgccccattacaacccgtgccaatgttttcagttgcaccaagcttagccaccaatgcatcagcagccgcctttaatccctatctgggacctgtttctccaagcctggtcccggcagagatcttgccgactgcaccaatgttggttacagggaatccgggtgtccctgtacctgcagctgctgcagctgctgcacagaaattaatgcgaacagacagacttgaggtatgtcgagagtaccaacgtggcaattgcaaccgaggagaaaatgattgtcggtttgctcatcctgctgacagcacaatgattgacaccaatgacaacacagtcactgtgtgtatggattacatcaaagggagatgctctcgggaaaagtgcaaatactttcatccccctgcacatttgcaagccaagatcaaggctgcccaataccaggtcaaccaggctgcagctgcacaggctgcagccaccgcagctgccatgttcccatggtgcacggtgctacgccagccactgtgtccgcagcaacaacatctgccacaagtgttcccttcgctgcaacagccacagccaaccagccccatccttgatgcttctacactgttgggtgcaacatcctgtcctgcagcagcaggaaaaatgatacccataatatctgccgaacatctgactagccacaagtatgttacccagatgtag

SEQ ID NO: 8389 - DNA, 4019 bp, Homo sapiens
atggacttgttgtccgggacgtacattttcgcggtcctgctagcatgcgtggtgttccactctggcgcccaggagaaaaactacaccatccgagaagaaatgccagaaaacgtcctgataggcgacttgttgaaagaccttaacttgtcgctgattccaaacaagtccttgacaactgctatgcagttcaagctagtgtacaagaccggagatgtgccactgattcgaattgaagaggatactggtgagatcttcactactggcgctcgcattgatcgtgagaaattatgtgctggtatcccaagggatgagcattgcttttatgaagtggaggttgccattttgccggatgaaatatttagactggttaagatacgttttctgatagaagatataaatgataatgcaccattgttcccagcaacagttatcaacatatcaattccagagaactcggctataaactctaaatatactctcccagcggctgttgatcctgacgtaggaataaacggagttcaaaactacgaactaattaagagtcaaaacatttttggcctcgatgtcattgaaacaccagaaggagacaagatgccacaactgattgttcaaaaggagttagatagggaagagaaggatacctacgtgatgaaagtaaaggttgaagatggtggctttcctcaaagatccagtactgctattttgcaagtgagtgttactgatacaaatgacaaccacccagtctttaaggagacagagattgaagtcagtataccagaaaatgctcctgtaggcacttcagtgacacagctccatgccacagatgctgacataggtgaaaatgccaagatccacttctctttcagcaatctagtctccaacattgccaggagattatttcacctcaatgccaccactggacttatcacaatcaaagaaccactggatagggaagaaacaccaaaccacaagttactggttttggcaagtgatggtggattgatgccagcaagagcaatggtgctggtaaatgttacagatgtcaatgataatgtcccatccattgacataagatacatcgtcaatcctgtcaatgacacagttgttctttcagaaaatattccactcaacaccaaaattgctctcataactgtgacggataaggatgcggaccataatggcagggtgacatgcttcacagatcatgaaatccctttcagattaaggccagtattcagtaatcagttcctcctggagactgcagcatatcttgactatgagtccacaaaagaatatgccattaaattactggctgcagatgctggcaaacctcctttgaatcagtcagcaatgctcttcatcaaagtgaaagatgaaaatgacaatgctccagttttcacccagtctttcgtaactgtttctattcctgagaataactctcctggcatccagttgacgaaagtaagtgcaatggatgcagacagtgggcctaatgctaagatcaattacctgctaggccctgatgctccacctgaattcagcctggattgtcgtacaggcatgctgactgtagtgaagaaactagatagagaaaaagaggataaatatttattcacaattctggcaaaagataacggggtaccacccttaaccagcaatgtcacagtctttgtaagcattattgatcagaatgacaatagcccagttttcactcacaatgaatacaacttctatgtcccagaaaaccttccaaggcatggtacagtaggactaatcactgtaactgatcctgattatggagacaattctgcagttacgctctccattttagatgagaatgatgacttcaccattgattcacaaactggtgtcatccgaccaaatatttcatttgatagagaaaaacaagaatcttacactttctatgtaaaggctgaggatggtggtagagtatcacgttcttcaagtgccaaagtaaccataaatgtggttgatgtcaatgacaacaaaccagttttcattgtccctccttccaactgttcttatgaattggttctaccgtccactaatccaggcacagtggtctttcaggtaattgctgttgacaatgacactggcatgaatgcagaggttcgttacagcattgtaggaggaaacacaagagatctgtttgcaatcgaccaagaaacaggcaacataacattgatggagaaatgtgatgttacagaccttggtttacacagagtgttggtcaaagctaatgacttaggacagcctgattctctcttcagtgttgtaattgtcaatctgttcgtgaatgagtcggtgaccaatgctacactgattaatgaactggtgcgcaaaagcactgaagcaccagtgaccccaaatactgagatagctgatgtatcctcaccaactagtgactatgtcaagatcctggttgcagctgttgctggcaccataactgtcgttgtagttattttcatcactgctgtagtaagatgtcgccaggcaccacaccttaaggctgctcagaaaaacaagcagaattctgaatgggctaccccaaacccagaaaacaggcagatgataatgatgaagaaaaagaaaaagaagaagaagcattcccctaagaacttgctgcttaattttgtcactattgaagaaactaaggcagatgatgttgacagtgatggaaacagagtcacactagaccttcctattgatctagaagagcaaacaatgggaaagtacaattgggtaactacacctactactttcaagcccgacagccctgatttggcccgacactacaaatctgcctctccacagcctgccttccaaattcagcctgaaactcccctgaattcgaagcaccacatcatccaagaactgcctctcgataacacctttgtggcctgtgactctatctccaagtgttcctcaagcagttcagatccctacagcgtttctgactgtggctatccagtgacgaccttcgaggtacctgtgtccgtacacaccagaccgccaatgaaggaggttgtgcgatcttgcacccccatgaaagagtctacaactatggagatctggattcatccccaaccacagcggaaatctgaagggaaagtggcaggaaagactgtgcttacttcctcttccccttctgccatgaccctttcatacctggactaaagaaagagctgcagaaataactgttcaaccaactgtggaagaggcctctgacaactgcactcaagaatgtctcatctatggccattctgatgcctgctggatgccggcatctctggatcattccagctcttcgcaagcacaggcctctgctctatgccacagcccaccactgtcacaggcctctactcagcaccacagcccacgagtgacacagaccattgctctctgccacagccctccagtgacacagaccatcgcattgtgccacagcccaccaccgatacaggtgtctgctctccaccacagtcctcctctagtgcaggctactgcacttcaccacagcccaccatcagcacaggcctcagccctctgctacagccctcctttagcacaggctgctgcaatcagccacagctctcctctgccacaggttattgccctccatcgtagtcaggcccaatcatcagtcagtttgcagcaaggttgggtgcaaggtgctgatgggctatgctctgttgatcagggagtgcaaggtagtgcaacatctcagttttacaccatgtctgaaagacttcatcccagtgatgattcaattaaagtcattcctttgacaaccttcactccacgccaacaggccagaccgtccagaggtgattcccccattatggaagaacatcccttgtaaagctaaaatagttacttcaaattttcagaaaagatgtatatagtcaaaatttaagatacaattccaatgagtattctgattatcagatttgtaaataactatgtaaatagaaacagataccagaataaatctacag

SEQ ID NO: 8390 - DNA, 565 bp, Homo sapiens
gcagacccagaaatccctggagcgcggcggacccggcggccggaggggcgaccccgcccgatgtaacgcgccccgcccgagccccggcccctgcacggggggcagcgaaacttctctgcgggttctggcgctggggcaccgaccccgcaacgactgcccgggctgcgggaggggaggagagcagagaacgtccccagggtgatgtgagcagagcccaggaatgccttatgtggatcggcagaaccgaatctgtgggtttctggacatcgaggagcatgagaacagcggcaagtttctgcggaggtacttcattctggacacccaggctaactgcctcctctggtatatggacaacccccagaatctggcaatgggggcaggagctgttggagctttgcagctgacctacatctcgaaggtgagcatagctaccccaaaacagaaaccaaaaactccattttgctttgttatcaatgccctgtctcagagatatttccttcaagccaatgatcagaaagatatgaaggactgggttgaagccctgaaccaagccagcaagatcacc

SEQ ID NO: 8391 - DNA, 738 bp, Homo sapiens
gcgcgaggggggtcggcgcagagacgcccagagccctggggtgctcaggcgccgctacgcgtgcatcccctctgctcggcagttctgcgcttttgtcctaatgagcgcggactagatggcttgattttcaagataatgatcaacccagctgtgctatgcgctctttctgcactgacctgcgggtacttcgaacttcgacagtccctcctcaggccctagtccagaggaaaaaaaaatgtttatttctttgtgggagttcttctatgggcacttttttcgattttggatgaaatggctattacgacagatgactgggaagtgtgaattgcagcgaatatttgatacctatgtaggtgcacaaaggacacacaggatagaaaattccttgacatactccaagaataaggttttacagaaggcgacacatgttgttcagagtgaagtggacaaatatgtagatgatattatgaaggaaaagaatattaaccctgagaaggatgccagttttaaaatatgcatgaagatgtgcttactgcagataactggttataaacagctgtatttggatgtagaaagtgtgaggaaaaggccatatgattctgataacctacagcatgaagagctactcatgaagctttggaatcttctaatgcccacgaagaagttaaacgctagaatctccaagcagtgggctgaaattggttttcagggtgatgatcccaagacagacttcagagg

SEQ ID NO: 8392 - DNA, 786 bp, Homo sapiens
actgcaaagtttgctgtccggctgcctagggtctgggaagctcgggcaccctccctctccggggctcctgctcccacccctccggcccccccaccgtcgcgctcctccaggctgggcctgtggccgcggtgctttttaattttcccccagctcagaatcttgctgctcggcccccaggagagcaacaactcaacgggaacgatgtggaaggtgtcagctctgctcttcgttttgggaagcgcgtcgctctgggtcctggcagaaggagccagcacaggccagccagaagatgacactgagactacaggtttggaaggcggcgttgccatgccaggtgccgaagatgatgtggtgactccaggaaccagcgaagaccgctataagtctggcttgacaactctggtggcaacaagtgtcaacagtgtaacaggcattcgcatcgaggatctgccaacttcagaaagcacagtccacgcgcaagaacaaagtccaagcgccacagcctcaaacgtggccaccagtcactccacggagaaagtggatggagacacacagacaacagttgagaaagatggtttgtcaacagtgaccctggttggaatcatagttggggtcttactagccatcggcttcattggtgcaatcatcgttgtggttatgcgaaaaatgtcgggaaggtactcgtaagtaaatagcttacacccatgtgataggcaaatgaaagccatcgtgtctagaactcaaatctttgaactaatagaaatctctgatataagctgggtgtgg

SEQ ID NO: 8393 - DNA, 3211 bp, Homo sapiens
tgacatccttataagaaggggagaggacacagccacagaggggcagccacgtgaagacagagccagagatgggggtgatgcagccaccaggaacaccagggttgccggcagcccctgaagctggaggaggcctggaatggattctccttcagtctccggaaggaaccaacccagccaacgcatcagttttggacctctggcctccagaactgcaggaagaaatttgctaatttgagccactcggctcatgggactttgttttggcagccgcaggacactcatgcactgtccttggagtgtaagtttttattttaaacatgtggctccatttgccagaatctccccaacagaccccaaacccaatccagggtctaggcagggtagcagctttgacaggagcctgtcggtgctggtggctcctccatgccccagacaccttgccttcccccgccccgtcctctccagttctgtgtataacacattcctgacaagccacacacaatggggcaaaacattttggagatctataaaataaccattttaaaatcatataactttggaaagcaaagggtagaaaatctttaaatgaacagtgcattgcccaatatgttaaagtgcttgggagtagttgtgtgtgtgtgtgtgtgtgtgtgtgtgtgtgtgtgtgtgttaagcaggtacatggctgagtaagacaaagcccctgccttcctgggggagacaggtggagaacgcaggaggccttgcctctgggtgtgtatggggtgcagggaggcttccgtggaggcagggggcccagcagcccttccggggttgccgctggaagatctcagaggatgcctaagagttttctaggtgaacaagaggaaggataccatgcagaggggacagtagagaagggtgttggtggggagcagcattgggaaagtggggaggttagcaggaggcgaggaaggccttggaggagcctatgcaatcgtgactgcctctgtgcaagatgggtctggcaggcgaggggccggtaggccgggggtgcccagggctctaggggttcccagagcccagctgcatcgctggaagctggcagggatgcatcggactcccagtaagtggagatccctttcacggcatatgtagcccagagcttttgtattaggtcctggagagatttatcttcccatccaaagcctctccaaaggccccatagcaatcactcccaacactttgctcgatgtggaaggctccatctcccagaagaactgtttgctcaacctcctggccatgcgggcgtgggagatgcatggccagctgtccctctgagcccattgctgtgcctgcggcttgccgtggtcccacctgagccgcatgtggcaacctcgtcctctgagtaagccctctgggcctccctgtttcaggtgcgttcttcacaaaggtggtggatgtgggtgccacctctctgaagcttgagatctgggacacagctggccaggagaagtaccacagcgtctgccacctctacttcaggggtgccaacgctgcgcttctggtgtacgacatcaccaggaaggtagggcccgccttgaggcacgtcccaccctccttcccaagcacctgccttctggtttctccagtgcaatgatgccatggcgtaatcacaaggaacagagactccattagtgagcaacagtcacctcctccaggatggcctcctgacaaccccccatcctcctccacagtggggttctgctcctccgtggtccacaaagaacatgccgttgccatctgccactcagtagttcctggtgctgcattagggtcagggtttggggtggtggccagtcccccagactctcttgcacaaagtggtcctttgaggacagctaggcgtgggagattcaggagctcgaggcctgacctgaaataccccgtggctggcagtctcctgggcctggtcagggtgaaggatctgatgtgtgtcctagcagttttctgcctggccgcacaggtcacccaggacaggaacgtgccctcctcagaggaacggagcagccctgcaggtgcgcccatggccagttggattctgtgacattttacacaacgtgatcagcaacactggcttccccctcccggaatagctaatgaccacctataagttttgtttgatgttactttttttcttcttttctaggattccttcctcaaggctcagcagtggctgaaggacctggaggaggagctgcacccaggagaagtcctggtgatgctggtgggcaacaagacggacctcagccaggagcgggaggtgaccttccaggaagggaaggagtttgccgacagccagaagttgctgttcatggaaacttcggccaaactgaaccaccaggtgtcggaggtgttcaatacagtggcccaagagctactgcagagaagcgacgaggagggccaggctctacggggggatgcagctgtggctctgaacaaggggcccgcgaggcaggccaaatgctgcgcccactaggtgcagccactcctgggggctgtggggaagacaccccctgcctgggccatggccagctctaggtggattctgattcactgtcaatgctgggttgctcccgagccctagatgttcctggaagttggccccctttatgaaaaccacttcccacagccagtgggaactgccagaggaagatctggcgtcacatggctcccaggaaagtgctgtgccctatccccactgataccatctgattccccgatgcctgtgcctgttccacctggacggtggccccctcagcctggcagcctctggacagagaggaaggaaggattggaaaagtccccgcagcacagcgacggtgggaagatgccttacgtctgatcttgatgggggcactggcctggagcctgggcccacctgcttctggggggttggggagcaggccagatggaggtggtggtgccaggaagaaatggagcgatgactgactgtggggtgggcccaggatttccacatcttggtgaagttgcccctgggaagggcagctgggggcagtggcgccagttcccttccatggtctcccggctggcaatgtggtgaagctgagtttctgtccaatgagcaggaagattctgagacatttcgcctgagatataagttgtactgcgtatgcagtttttcctccaaaaattaaattgcttttgacaa

SEQ ID NO: 8394 - DNA, 2389 bp, Homo sapiens
gggagctgaaagggtcttcgctggcggccggtaactggcggcggttgggaacggccgagtgtggctcttctggtgtttcagcttggggagagaggggtggccttcctcttgcagttgaggccggcgccgagccggacttcaggcggatctcgtggcggagcccatcttgctccctctcccaggcctttacccgctccctaggattcccgggccctgtaggtgggagttgggagacgtgagttctctttcattctgcgcctctcattggctctctgaccttgtgcggaacgcgtcctttagctgacctcagctgcattttttagaagatggagattgtattcacagtgactgtcagctttttaacggcgggaactgacgtagtgttaaacactgtcgtgtatcgctggcacagcacaaggacattataggtattctgtactcaattaagttattttgagtcacagaccttttgaaaatctcgtgtaagctatggcccctccacctctctaatacttcccccggcccccaccccaagcacacacaaaagcttatgcataggaaatttgttttactatttcggattacttccaagatctctctcctgatgcccatctatggatcccagagtctggcaatactgcttttaaagagacagtgttagggatcttggaagcacagccaacatgtgtgacattgaagaagccactaaccaactcctagatgtgaaccttcatgagaaccagaagtctgtacaagtgacagaaagtgacctcggaagtgaatctgagcttctagtcactattggagccactgtacctactggctttgagcaaacagctgcagatgaagtcagagagaaacttgggtcatcatgcaaaatcagcagagaccgtggcaagatatattttgtcatttcagtggaaagtctggcacaggttcattgtctgagatcagttgataacttatttgtggtggttcaggagtttcaagattaccagttcaaacaaacaaaggaagaagttctaaaggattttgaagacttggctggaaaactcccatggtcaaaccccttaaaagtgtggaaaattaatgccagttttaaaaagaaaaaagcaaagcgcaaaaagataaatcagaattcaagtaaagagaagattaataatggacaagaagtcaaaatcgatcagagaaatgttaaaaaagagttcactagccatgctttagattctcatatcttagattattatgaaaatccagccatcaaagaggatgtatcaacattaataggtgatgatttggcatcttgcaaagatgagactgatgaaagctcaaaagaagaaactgagcctcaagtgctgaagtttagagtcacatgcaacagggcaggagagaaacattgctttacctcaaatgaggctgcaagagattttgggggtgctgttcaagattattttaagtggaaggccgacatgaccaactttgatgtggaggttcttttgaacatccatgataatgaagtcattgtgggcattgcattgactgaagagagtctccaccgaagaaatataacacattttggacctacaactcttagatcaactcttgcctatgggatgctcaggctctgtgatcctctaccttatgatataatagtcgatccaatgtgtggaactggggcaataccaatagagggggccactgaatggtctgactgtttccatattgctggtgataataatccactggctgtgaatagagcagcaaataacattgcatctttattgaccaagagccaaattaaagaaggcaaaccctcctggggcttgcccatagatgctgttcagtgggatatctgcaatctgccattgagaactggctctgtggatattattgtaacagatttgccatttggaaaaaggatgggatccaagaagagaaactggaacctttatccagcttgcctacgggagatgagccgtgtctgcacacctaccacaggccgagctgtactacttactcaagacacaaaatgctttaccaaggcgttatctggaatgcgacacgtatggcgaaaggtggatacagtctgggtgaacgttggtggtcttcgtgctgcagtttacgttctgatacgtacacctcaagcttttgttcatccttcagaacaagacggagaaagaggaactctttggcaatgcaaagaatgaagatgactaatagtacttgtacttcccaccactggaaatgttagcataaaagaacttggagaggaaaaaagtattaacaaaactgcagtctgcactctttaaacctgtttaaggctcttcatcctggttagcaaaaggtgtgaatgtaatgtgatggaatttaaaagttttatgagaccagg

SEQ ID NO: 8395 - DNA, 3016 bp, Homo sapiens
gtttatttttgttgtcagtgccatgtaatctaaagtctgactcgtaggaagggacaagggaacagaagtcacatactcgccaccgacaaggtgatgtgctgtcatccttcggtgttcacctggcaaacttgggagacactgagtcgccttgcttttgccagagctcagttgagtcgcctcgggtcacctgcctggggaatctcagatgagctagaggaaagtatgcctcagactcctcccttttcagcaatgtttgacagcagtggttacaatcgaaacctctatcagtctgcagaggacagctgtggagggttgtattaccatgacaacaacctcctctctggatccctggaagcactcatccagcacttagtacctaatgtggattactatccagatagaacatacatatttaccttcctactcagttctcggttatttatgcatccgtatgagctaatggccaaagtttgccacttatgtgttgagcaccagagactaagtgatcctgatagtgataagaaccagatgagaaaaattgcacccaaaatccttcaactcctcacggaatggacggaaacatttccctatgattttcgggatgaaagaatgatgagaaacttaaaagatctggctcaccgaatagccagtggcgaagagacatacagaaagaatgtccagcaaatgatgcagtgtctgatccgcaagcttgctgcgctcagccagtacgaagaagtcctggcaaaaatcagctccacatccacagatcggctcacagttctcaagaccaagccacagtctatacaaagggatatcattactgtctgcaacgacccttacacgttggcccagcagctgactcatatagagctggagaggctcaattatattgggccagaagaatttgttcaggcgttcgtgcagaaggaccctttggataatgacaagagttgctacagtgaacggaagaaaacacgaaacttagaagcttacgtggaatggtttaatcgcctcagctacttggttgctacagaaatctgtatgcctgttaagaaaaaacaccgagcaagaatgattgagtatttcattgacgtagctcgggagtgttttaacattggcaacttcaactccttgatggcgataatctctggtatgaatatgagcccagtctctcgactaaaaaaaacttgggccaaagtgaagactgcaaaatttgacattcttgagcatcagatggacccttcaagcaatttctataattatcgaacagctcttcgtggggcagcacaaaggtctttaactgctcatagtagtagagaaaagattgtgataccattcttcagtctcttaatcaaagatatttatttcctcaatgagggttgtgccaaccgccttcccaatggccatgtcaattttgagaaattttgggaactggccaaacaagtgagtgaatttatgacatggaaacaagtggagtgtccatttgagagggaccggaagatcttgcagtatctgctcacagtaccagtcttcagtgaagatgctctctacttggcttcttatgagagtgaaggacctgaaaatcatatagagaaagacagatggaagtctttaaggtcgagcctcttaggcagagtttaacacatgggagctgcctgcctgctgctgctgctgcttcctgcagatcatggaggggctggcctttgttttctggcatctcgtaccacgaacactcatgaagaccctgcagtcattggagcacccgggtcagcaaagcacacaagctcactcaagaccagatggagaacttatttcctgcagctgacagatagactcagattttgtgagactgaaatgttcactgaagacacttgagaaagaatcctctaaaaatcccggctctgcacattattcatctcctggaatttccatgtgaatcacagctctgcacctggatggagttttcttttgtgtgtgtgtgttttttttaatttggttgaacatttgctgctaatgggacttgcccagctgagtgctggctctgaggaagcccacgtttcttttgttaacttaaatgaagaaaggagtggagggaggggatctaaaacccccccgtttagatcccaaaccttagctcaatcagtattgccagagaggggtaagactggttggaagctgactgcagactttgtttccccttagtatgtgctgtgttgtaaatttttctcctccctcctcctacaaggttttgagttggctgctggttagcaaactcctttttacccatataagttatttaatataataatgaagctcaacactgtggtaggaaaatagccactagaaagaaaataaaaagcagagtttgtcattggactgcttaacatgctagaaggactttttttttttttttttttttttttttttgctcttctgagctgtttacaactgaccactgtgttccacagatgtatttttcaatagctttttgttacttagttttccatgatgcctgttatttttctcttgtaaatttaaatgagctgactttaaggatcttgggaaaacccatggcataattacaattttctttttaatcgacttttcattacttttgggagtctgttggtaactaaagatgtcaacaaagaataaattggagaagttacctgtccccactatagcagtaaacaaaacagatgaaaaacaccttgctgttaactcaatggttgatctaattgtgaaatcgttcaccttgttaaacatctaagtaagtctgtagtcgctctgcaaacagccattatatttatttactctagaagaaactgtagagtagtaattcgtgctaatgagaaaaacaaaataccatgttcaaaacagatgtatttgaaaacttaatgacatggttccaaaaactagagcatgtatgtatgctgtgcatcatctcagcagacctaaaatatccccaagttgtccctttacagccatcaatatattttacactctgcggccagga

SEQ ID NO: 8396 - DNA, 582 bp, Homo sapiens
tttggtatcagatgatcttgcctcctcattttgataaatccaagaaatatcctctactattagatgtgtatgcaggcccatgtagtcaaaaagcagacactgtcttcagactgaactgggccacttaccttgcaagcacagaaaacattatagtagctagctttgatggcagaggaagtggttaccaaggagataagatcatgcatgcaatcaacagaagactgggaacatttgaagttgaagatcaaattgaagcagccagacaattttcaaaaatgggatttgtggacaacaaacgaattgcaatttggggctggtcatatggagggtacgtaacctcaatggtcctgggatcgggaagtggcgtgttcaagtgtggaatagccgtggcgcctgtatcccggtgggagtactatgactcagtgtacacagaacgttacatgggtctcccaactccagaagacaaccttgaccattacagagtaagagatgaggacctatacctattttataacctatttataagtggtttaagaaccttcttaattgtatctattctagaaaatacatatttttatttcc

SEQ ID NO: 8397 - DNA, 469 bp, Homo sapiens
ggggggctggggggtggagtcaggttcctctacgggaagaaagtggagggaactgcctttgtcatcttcgggatccaggatggcgaacagaggatttccctgcctgaatccctcaagcgcattccgattgaggatggctcgggggaggttgtgctgagccggaaggtactgctggacggggtgcagaacccccgagcagaagacctggtggggaagtctttgtacgtgtctgccaccgtcatcttgcactcaggcagtgacatggtgcaggcagagcgcagcgggatccccatcgtgacctctccctaccagatccacttcaccaagacacccaagtacttcaaaccaggaatgccctttgacctcatggtgttcgtgacgaaccctgatggctctccagcctaccgagtccccgtggcagtccagggcgaggacactgtgcagtctctaacccagggagatggcgtgg

SEQ ID NO: 8398 - DNA, 761 bp, Homo sapiens
cagggatttgcactactgaattttgtagtaaaatactcccctgaacgacagcgttctcttcgtcctcatcatgatgcttctacatttaccataaacattgcacttaataacgtgggagaagactttcagggaggtggttgcaaatttctaaggtacaattgctctattgagtcaccacgaaaaggctggagcttcatgcatcctgggagactcacacatttgcatgaaggacttcctgttaaaaatggaacaagatacattgcagtgtcatttatagatccctaagttatttacttttcattgaattgaaatttattttggatgaatgactggcatgaacacgtctttgaagttgtggctgagaagatgagaggaatatttaaataacatcaacagaacaacttcactttgggccaaacatttgaaaaactttttataaaaaattgtttgatatttcttaatgtctgctctgagccttaaaacacagattgaagaagaaaagaaagaaaaaacttaaatatttatttctatgctttgttgcctctgagaataatgacaatttatgaatttgtgtttcaaattgataaaatatttaggtacaaataacaagactaataatattttcttatttaaaaaaagcatgggaagatttttatttatcaaaatatagaggaaatgtagacaaaatggatataaatgaaaattaccatgttgtaaaaccttgaaaatcagattctaactggatttgtatgcaactaagt

SEQ ID NO: 8399 - DNA, 827 bp, Homo sapiens
atttctctgcccacacactccgagactcgccccgccgcccgaggtgcactggcggagacagggaggccgcgcccggcgtgcccactttgccacttccaaaatttgctgaagctgaggctgtgagcacacctcagaagtggctgggagggaacccaaacctaattgccaaatttcaggtccaggaggggagcctcttgtgtgtttattgtttgtccgtctatttcgtgagctgcgcaggcccgcgattcctctcctcttgtctataggtagcgctggtggattggaatcttgaagcaggtgtacagtgtaaagctgccctggatgagcagtttgaacctcagaagactctgttcatccagtgcgatgtggctgaccagcaacaactgagagacacttttagaaaagttgtagaccactttggaagactggacattttggtcaataatgctggagtgaataatgagaaaaactgggaaaaaactctgcaaattaatttggtttctgttatcagtggaacctatcttggtttggattacatgagtaagcaaaatggaggtgaaggcggcatcattatcaatatgtcatctttagcaggactcatgcccgttgcacagcagccggtttattgtgcttcaaagcatggcatagttggattcacacgctcagcagcgttggctgctaatcttatgaacagtggtgtgagactgaatgccatttgtccaggctttgttaacacagccatccttgaatcaattgaaaaagaagaaaacatgggacaatatatagaatataaggatcatatcaaggatatgattaaatactatgga

SEQ ID NO: 8400 - DNA, 572 bp, Homo sapiens
gagaagaaaatagccagctttagataaagcactataacaaaggcttctagttttatatatcatggtgtccattaaagcttaatagggaagagtccattgaacctggctgggcgcacgcgcccagcaccctgcctccggcgatgccgccccagcccctctgatggccctcctctctgctgccactcattccagaacaggaggcatgagcccggaacgcgcttgcttttaggagacagccactttctgtgtggtacgctggattcaaggatgcctgatcgtactgagaagcactccacaatgccagactcacctgtggatgtgaagacgcaatctaggctgactcctccaacaatgccacctcccccaactactcaaggagctccaagaaccagttcatttacaccgacaacgttaactaatggcacgagccattctcctacagccttgaatggcgccccctcaccacccaatggcttcagcaatgggccttcctcttcttcctcctcctctctggctaatcaacagctgcccccagcctgtggtgccaggcaactcagcaagctgaaaaggtt

SEQ ID NO: 8401 - DNA, 371 bp, Homo sapiens
caggtatcgtgggaggcattggcatagatgtgttctgattgtcggccaaaacaccaggctcacggaaatgcaggtgctgtttgcttcaggagagcattctctggatgccctcccatgcacacacgcctggagggggctcacctccacccagccctgagcttctgaggccagagactcaagggctcagggaagggtggctacagtgagcctgggccgtgaacactcaccccttttattgccttcagagggctcctgccacagcagatgaagcaaggaagttggaggaggccaagtcaagaggctccctggtggatttcattaaacggtttccatgcatctttctgaggctcctgatgaactcactcttcgtc

SEQ ID NO: 8402 - DNA, 4284 bp, Homo sapiens
ttatctatgccttgctcctgatggaatttgggatccccaaggtccagatctcagcaactgttcttctccttgggtcaatcatataacacagaagttgaaatctggtgaaacagctgccaacattgctagagagctggctgaacagacaagaaatcacttgaatgctggggacatcacctactctgtccgggccatggaccagctggtaggcctcctagatgtacagcttcggaacttgaccccaggtggaaaagatagtgctgcccggagtttgaacaaggcaatggtcgagacagttaacaacctccttcagccacaagctttgaatgcatggagagacctgactacgagtgatcagctgcgtgcggccaccatgttgcttcatactgtggaggaaagtgcttttgtgctggctgataaccttttgaagactgacattgtcagggagaatacagacaatattaaattggaagttgcaagactgagcacagaaggaaacttagaagacctaaaatttccagaaaacatgggccatggaagcactatccagctgtctgcaaataccttaaagcaaaatggccgaaatggagagatcagagtggcctttgtcctgtataacaacttgggtccttatttatccacggagaatgccagtatgaagttgggaacggaagctttgtccacaaatcattctgttattgtcaattcccctgttattacggcagcaataaacaaagagttcagtaacaaggtttatttggctgatcctgtggtatttactgttaaacatatcaagcagtcagaggaaaatttcaaccctaactgttcattttggagctactccaagcgtacaatgacaggttattggtcaacacaaggctgtcggctcctgacaacaaataagacacatactacatgctcttgtaaccacctaacaaattttgcagtactgatggcacatgtggaagttaagcacagtgatgcggtccatgacctccttctggatgtgatcacgtgggttggaattttgctgtcccttgtttgtctcctgatttgcatcttcacattttgctttttccgggggctccagagtgaccgtaacaccatccacaagaacctctgcatcagtctctttgtagcagagctgctcttcctgattgggatcaaccgaactgaccaaccaattgcctgtgctgttttcgctgccctgttacatttcttcttcttggctgccttcacctggatgttcctggagggggtgcagctttatatcatgctggtggaggtttttgagagtgaacattcacgtaggaaatacttttatctggtcggctatgggatgcctgcactcattgtggctgtgtcagctgcagtagactacaggagttatggaacagataaagtatgttggctccgacttgacacctacttcatttggagttttataggaccagcaactttgataattatgcttaatgtaatcttccttgggattgctttatataaaatgtttcatcatactgctatactgaaacctgaatcaggctgtcttgataacatcaagtcatgggttataggtgcaatagctcttctctgcctattaggattgacctgggcctttggactcatgtatattaatgaaagcacagtcatcatggcctatctcttcaccattttcaattctctacagggaatgtttatatttattttccattgtgtcctacagaagaaggtacgaaaagagtatgggaaatgcctgcgaacacattgctgtagtggcaaaagtacagagagttccattggttcagggaaaacatctggttctcgaactcctggacgctactccacaggctcacagagccgaatccgtagaatgtggaatgacacggttcgaaagcagtcagagtcttcctttattactggagacataaacagttcagcgtcactcaacagagaggggcttctgaacaatgccagggatacaagtgtcatggatactctaccactgaatggtaaccatggcaatagttacagcattgccagcggcgaatacctgagcaactgtgtgcaaatcatagaccgtggctataaccataacgagaccgccctagagaaaaagattctgaaggaactcacttccaactatatcccttcttacctgaacaaccatgagcgctccagtgaacagaacaggaatctgatgaacaagctggtgaataaccttggcagtggaagggaagatgatgccattgtcctggatgatgccacctcgtttaaccacgaggagagtttgggcctggaactcattcatgaggaatctgatgctcctttgctgcccccaagagtatactccaccgagaaccaccagccacaccattataccagaaggcggatcccccaagaccacagtgagagctttttccctttgctaaccaacgagcacacagaagatctccagtcaccccatagagactctctctataccagcatgccgacactggctggtgtggccgccacagagagtgttaccaccagcacccagaccgaacccccaccggccaaatgtggtgatgccgaagatgtttactacaaaagcatgccaaacctaggctccagaaaccacgtccatcagctgcatacttactaccagctaggtcgcggcagcagtgatggatttatagttcctccaaacaaagatgggacccctcccgagggaagttcaaaaggaccggctcatttggtcactagtctatagaagatgacacagaaattggaaccaacaaaactgctaacaccttgttgactgttctgagttgatataagcagtggtaataatgtgtgtactcctaaatctttatgctgtcctctaaagacaaacacaaactctcagacttttttttttttaatgggatttttaggtcagcccaggggagaaagataactgctaaaattcccctgtaccccatcctttcttgtcctttccccttcagatggagacttcattatgttaatgaacaagatatgaagaaaatggcactcattgtggccttgttgaattatgttgtgtatgttttaacatctctgatgctgtgttactaaaattacaaggacctgctttttaaaaggccagaacaattgtctgaaattagtaacaatgctgcatctagattggagtgctgcacaaacaaacataagagcaaagcaaaactgtatcacatagggtttttggtcactcacaacctgaattcaccacagctggaatagctgtggaaaacaaaataaaacaacaaaattaataatgaaatggaggggaattctagaattatatgctaaatgcatattttatgatttgctgtattaactgatgataaaactaatggcagaaaaagaagttgagcaatttctatgtaatgtacagatactagcattgcacatatagtctgctttctgttcctccagaatttgagtcctgttaatgtagtagaaaaaaaaaaaagaaattttctttttcttttgtgctggtcttgcaagtttgtctaccagtaagagagcaaagtttccttcctttcttctctttcttcattttctttttttcttttttgccttttattcctttaaaatttcgcctggcaaaaaataaataaatggaactatcactttataagaatcattttctagtaatgcaaacaaattattttttacaaaaaaacaaaataaataaaattagacttccttccctcactatatatctttatgcagtcagaatatttccaacagtgttttttgcaaattagagcaggacaaacttttatgtttacagggcacgtctgttgtaatgcaaagcatatttggcaagcagttcatcaccaggacactagctatgattctagaagtcaaaaggtgtctatagaactagtggggcttctgcatgtgaaaaacggttttccataggcattaaagtgctgaatgctcagtctgatcaacaagtgggcacctgcactaccactttttagaggaaattcactccctcgtaagcattggaaggtcaaattattttgaagtgatttttttaaaaaaaagtcttctgtttattaacaggaaaatttatttatttgacaggattttgagtaatgtaggaatacaaaaggtaaattagcagcacatataatttttttttaatttatgatccattttgtatggtctcaaagttggatgacctcattactaatatttgttgtaaaagtgaaacttgtttgccaaccaataaacaactgattgagattt

SEQ ID NO: 8403 - DNA, 2860 bp, Homo sapiens
cctggcatcgtggtgtggagagagtttccttaaccagacctcaatagcaaatgtccagggaaagattaccagaaactacccaaggctgccagaagaaggggagggtagaagagatgagtcagctctcagctgcagcagcttctcccaggctagaggaaagtgagggatcctgttgtgttttggaagataggcagaaatcatcgtggaagggcttgaggctgggtaaagcagatcttccccaagacctggcactactgagacatttgggaaagtttggggcccatgagagtcaagagaagatgaaggaggggagagaagaagaagctggggagctgggaacatcatctcaggctggaggacaagcctgtgacaggaccggttccacagaggagtcaaaagagttaaagcccagaaggcagctggaagagaaggcaaagctggaaaaggaagtaaaagcagcagctgttctgattttgaaggagagtaaatgggcttatttgctttatggtctaaggagcagagaaaactcattctcctctggttataaattcccgagttgcagaaggaagtctcctaactactgatcggttcctcttggggtgggaaaatctctgagctacagtgagtcattcccaggatgccaacaatggcctccacttctccctctgcccctgcccagatacaagaacgccctggggagagtcatgaaagaacttcccccaggggagcccattcctcggcccagccaggccaggccagccctgggaagtagcttgggcagccgggctgggcggggagcgcaggtggcgccctttgtgcctgctccgaggctgagcctggggctcctggctgccttcttccggacaatggccacgggcactgtgaagggactccaggagcctggtggctttgtgtgaagccctgagaaaatgtgctgtcctctgttcttgggcttgcctaggggcacagagtcctttagaaaagtctcccagaagggaacagaacacacccaggcccacccctcggatgttagagatcagggtcagtgcccccattagggtacaaagtgcctctccttccatttctcccaggtcagtaacagctttggctaaattaaccctggctggacccattttcttccattttactcctttgccccttcaggtggacaatttgacctttgatggggaagaatatcagtgggcagcagaaggggcacggcccgcatgcattctcaagtcttctctgcctttccccacagcctccctctgcgcttctgggtgaacgtgattaagaacccccagttcgtgtttgacatccacaagggcagcatcacggacgcctgcctctctgtggtggcccagaccttcatggactcttgttcaacgtcagagcaccggctgggcaaggactccccctccaacaagctgctctatgccaaggacatccccagctacaagagctgggtggagagatactacgcagacatcgccaagctcccagccatcagtgaccaggacatgaatgcctacctcgccgagcagtcccgcctgcacgccgtggagttcaacatgctgagtgccctcaatgagatctactcctatgtcagcaagtatagtgaggagctcatcggggccctagagcaggatgagcaggcacggcggcagcggctggcttataaggtggagcagctcattaatgccatgtccattgagagctgagaggaggagcctcgcattcctgggaagagggacctgtccaagctgtcacactgggagtctcagatggaaggacaagtgatggggatcaggccccagagcttgctgtcccctgagaccccatcctggggagaggggaggactcctctccctacgccagccaagtttcgtcatagccagttccagctgggagagacagtgggcgtcgtccatcctcagtgagaacaccagagaacccggggccgggagaaggtggttcttcaagccgagaggcacgagctggggacagttctgcctctgtgactgctgctttgcatgaaaactcatttgatgtatattggggaaataatgagaactttatttaatttttttaagaaaaagggaaaaaaacagaaataaaacaaaaagccgccctgttaatcccgtccaacttttgtttaattctgatttctgtctcccttccatcttttctcccattcctccttctttatataatgcctatttccaaatgccagagaaagcagagatgctgagagacattggagagaaaatgactgtctccttttccttgaaattaaaaaaaaaaaaaaaaagagaaagaggagaagaagaatgatgagcacaagtatgcaccaaacacttcgcaaaaacagaggccagtaaaacctggaattatcccggcagccagaggagtatggaacttccagaactttgcacaaattgcaaagccatcaagagctcaccctggctgactggaaactgagctttatctaccacacacctgtatattctcatcttttgagaggagatgtgtacctagatagtaccaatgctttttgctactgttttttgttttgttttatttaatcctaaacctcaacaaatgaggagctggtctttgatatgtttcctttcaatttccctaaagttactatgagaagtggggtgaggtgggcctctcccagaccagacacctggcagccctgcctcatatcaatccctgtcataaaccaggcaccctggggaaacggcctggaggtgtgtgggccaggcctccacgaggttccatttgaaagttgatttggagacataggtgtttgactttggagttcactccaatcatccagtggtccctggcaatt

SEQ ID NO: 8404 - DNA, 563 bp, Homo sapiens
gaagtcgataagaccaggagaagtgaagatgtaacatgttatctgtcgctcctcttagctggcggagagaatttacatttaaagattagcagagtgagaaagagaaatctgccttttgttgtgtggggtgaggaggaggcatctacccctggccttgacgctatctcccatcacctctgctatccagacaggactcaccgagtatcaaatgataagaactgagcacactggatgaaataatacttgcactgggagcactaagaaaagattgatctctgggctggtgaacataatctctgtcccagtcagaaaaggagagaggaaattagcagagcgattggtggagaatgatatctgtcaaaagaaacacttggagagcactgagtttagtaataggtgactgccggaaaaaagggaactttgaatattgtcaagataaaccccacttgaaaaactgaggtgcttaaggagtaaaataatatgttcctggtggcatcctccagatcgtactgagaagcactccacaatgccagactcacctgtggatgtgaagacgcaatcta

SEQ ID NO: 8405 - DNA, 1130 bp, Homo sapiens
ggatcgcagcgcggagttcaggaaatggaaggcgcaatgtttgagcaaagcggacctcagccggaagggcagtgttgacgaggatgtggtagagcttgtgcagtttctgaacatgcgagatcagtttttcaccaccagctcctgcgctggccgcatcctactccttgaccgggttcagttaccccagtcaacagcagtctgaaaatattaaatgaaaattccagaaataaacaattaggtataaatggttttgaggttcagaaacaaaactgttgctggctactggttacacacaaactttgtgtaaaagatgatgtgattgtagctctgaagaaagcaaatggtgatgccactttgaaatttgaaccatttgttcttcatgtgcagtgtcgacaattgcaggatgcacagattctgcattccatggcaatagattctggtttcaggaactctggcataacggtgggaaagagaggaaaaactatgttggctgtccggagtacacatggcttagaagttccattaagccataagggaaaactgatggtgacagaggaatatattgacttcctgttaaatgtggcaaatcaaaaaatggaggaaaacaagaaaagaattgagaggttttacaactgcctacagcatgctttggaaagggaaacgatgactaacttacatcccaagatcaaagagaaaaataactcatcatatattcataagaaaaaaagaaacccagaaaaaacacgtgcccagtgtattactaaagaaagtgatgaagaacttgaaaatgatgatgatgatgatctaggaatcaatgttaccatcttccctgaagattactaagctttggttctgatgtgtcttggccgtaatgtttctagtaggttttataaagctgctcttcataagagtattttagtttgttgagtgtatcagccattcataagccagtaatgacaagtgcagagcttcaaactataactttgttgcccagaggatgtgcagttgtcatctaagctctcagcagtacccggcttatcctacgacttcacctgaaatgctatagttatccctacttttttaccagtttctcccagaagcacctgcttaataaatcaaagatgtttgaa

SEQ ID NO: 8406 - DNA, 575 bp, Homo sapiens
agcacagcccagggaaacctcctcacagttttcatccagccacgggccagcatgtctgggggcaaatacgtagactcggagggacatctctacaccgttcccatccgggaacagggcaacatctacaagcccaacaacaaggccatggcagacgagctgagcgagaagcaagtgtacgacgcgcacaccaaggagatcgacctggtcaaccgcgaccctaaacacctcaacgatgacgtggtcaaggtaagccaaggcgaccaacagggaagggctgggacagctctcctctggcagttagcccgtgcatccttctttagcattgccgtgtacgcacaccccaccccgccccctacacgcgcacacacacacacacacagagttttgtgggtttgatgtgtgggagctcccgcagtcggcagaaacgttacatctcccttcccccatctccccccaatagttagttcagctgaaattcagctaaagtgagttttgtagaagttcctataactacacttttatcctagcaaatgagcctattgacctcagcaacagacggcccatactccttggga

SEQ ID NO: 8407 - DNA, 4089 bp, Homo sapiens
atttgggatctctagggtacccacatgaagtcatagcttactgtgacttacacaggcccctgaggatgaaggtaacagtcctgtgagcactgaggctgggctgggaccaacacctgagccatggctccagcactctgattcctggcccagccatgctgctgagggtgcacagcccaggcctaccatcgcccccacccttggtggcagaaccgagcactacccagcaaggtgtaattacttcaagcctccaggatggcaatccagttccgttcgctcttccccttggcattgcctgggatgctggcgctcctcggctggtggtggtttttctctcgtaaaaaaggccatgtcagcagccatgatgagcagcaggtggaggctggtgctgtgcagctgagggctgaccctgccatcaaggaacctctccccgtggaagacgtctgtcccaaagtagtgtccacaccccccagtgtcacagagcctccagaaaaggaactgtccaccgtgagcaagctgcctgcagagcccccagcattgctccagacacacccaccttgccgaagatcagagtcctcgggcattcttcctaacaccacagacatgagattgcgaccaggaacacgcagagatgacagtacaaagctggagctagccctgacaggtggtgaagccaaatcgattcctctagagtgccccctttcatccccaaagggtgtactattctccagcaaatcagctgaggtgtgtaagcaagattcccccttcagcagggtgccaaggaaggtccagccaggctaccccgtagtccccgcagagaagcgtagctctggggagagggcaagagagacaggtggggccgaagggactggtgatgccgtgttgggggaaaaggtgcttgaagaagctctgttgtctcgggagcatgtcttggaattggagaacagcaagggccccagcctggcctctttagagggggaagaagataaggggaagagcagctcatcccaggtggtggggccagtgcaggaggaagagtatgtagcagagaagttgccaagtaggttcatcgagtcggctcacacagagctggcaaaggacgatgcggcgccagcacccccagtcgcagacgccaaagcccaggatagaggtgtcgagggagaactgggcaatgaggagagcttggatagaaatgaggagggcttggatagaaatgaggagggcttggatagaaatgaggagagcttggatagaaatgaggagggcttggatagaaatgaggagattaagcgggctgccttccagataatctcccaagtgatctcagaagcaaccgaacaggtgctggccaccacggttggcaaggttgcaggtcgtgtgtgtcaggccagtcagctccaagggcagaaggaagagagctgtgtcccagttcaccagaaaactgtcttgggcccagacactgcggagcctgccacagcagaggcagctgttgccccgccggatgctggcctccccttgccaggcctaccagcagagggctcaccaccaccaaagacctacgtgagctgcctgaagagccttctgtccagccccaccaaggacagtaagccaaatatctctgcacaccacatctccctggcctcctgcctggcactgaccacccccagtgaagagttgccggaccgggcaggcatcctggtggaagatgccacctgtgtcacctgcatgtcagacagcagccaaagtgtccctttggtggcttctccaggacactgctcagattctttcagcacttcagggcttgaagactcttgcacagagaccagctcgagccccagggacaaggccatcaccccgccactgccagaaagtactgtgcccttcagcaatggggtgctgaagggggagttgtcagacttgggggctgaggatggatggaccatggatgcggaagcagatcattcaggagttgcagctccacccccgggaaagcggggcactttgataacgaggtgtcctgggtttttcgagtgctgaccccagcgtagacagttcagaccgctaacttacaggttctgacaggaacagcatggattccgtggatagctgttgcagtctcaagaagactgagagcttccaaaatgcccaggcaggctccaaccctaagaaggtcgacctcatcatctgggagatcgaggtgccaaagcacttagtcggtcggctaattggcaagcaggggcgctatgtgagttttctgaagcaaacatctggtgccaagatctacatttcaaccctgccttacacccagagcgtccagatctgccacatagaaggctctcaacatcatgtagacaaagcgctgaacttgattgggaagaagttcaaagagctgaacctcaccaatatctacgctcccccattgccttcactggcactgccttctctgccgatgacatcctggctcatgctgcctgatggcatcaccgtggaggtcattgtggtcaaccaggtcaatgccgggcacctgttcgtgcagcagcacacacaccctaccttccacgcgctgcgcagcctcgaccagcagatgtacctctgttactctcagcctggaatccccaccttgcccaccccagtggaaataacggtcatctgtgccgcccctggtgcggacggggcctggtggcgagcccaagtggttgcctcctacgaggagaccaacgaagtggagattcgatacgtggactacggcggatataagagggtgaaagtagacgtgctccggcaaatcaggtctgactttgtcaccctgccgtttcagggagcagaagtccttctggacagtgtgatgcccctgtcagacgatgaccagttttcaccggaagcagatgccgccatgagcgagatgacggggaatacagcactgcttgctcaggtgacaagttacagtccaactggtcttcctctgattcagctgtggagtgtggttggagatgaagtggtgttgataaaccggtccctggtggagcgaggccttgcccagtgggtagacagctactacacaagcctttgacccccatgctgcttcctgagagtctttttttgcactgttgaaattgggcttggcactcaagtcaaagatgaacatcggaataacaaacattgtcctctccagaaagtcctttctttctccatactgtagtcctattgagaagacatttcgtctctgagaaaaaaggatggaactatgggttctcttcgcaaagccaaaggatagtgtttaacaagccagctggcttatgctggttctcagctgtttaaaaaaaaaaaaaaaaaggaatagaaacagtttcaaccagattgtcctattccccctgttccattcccctcttcttccttctatctccttccccggcaaaaaccaaacaaactggcagacaggccagggatgtatgttgcttgcttgagagggtttcttttacttcaaaatctttcttcagggagcaagacatgaactgactaattggtatccactacttgtacagcttacataaatgagttgatgatatttaaccagtttttataaacttcatttaggtctctaaacacagactttttaaattgcaactgtaaatatgaaatggtcatcacatctgaccttggtcagtggggaggggaactggtatcctgccaagcctggttgtaatttgtaaccattttctatttgtgcaaactctgtaaatatgtgtttaaacaaatgtaatattttgtacaagatacactggagaacaaagggaactcaagattcttccagccacatgtcacctgtaggtagaagtaaactctgcagtgcagcttctgctcttggcccctctggccagggcccctgtggcttcctgcacactggacaggtgactgtatggtagagactgtgatctgggaactttttgctgtacaaatctgtttaaaaaaaaaaaaaagtaactcattgaattaacttgcagtggtgtgtttgattcttttttagactggcttcagcattgtgcagtttaaaaataagtaagtaacttacataaatcttcaattgtatgaact

SEQ ID NO: 8408 - DNA, 802 bp, Homo sapiens
gaacaagtgtcattcaaggatgtatgtgtggacttcactcaggaagagtggtatctgctggaccctgctcagaagattctatacagagatgtgatcctggaaaattatagcaatcttgtctcagtagggtattgcattactaaaccagaagtgatctttaagatcgagcaaggagaagagccctggatattagaaaaaggattcccaagccagtgccacccagaaaggaaatggaaagttgatgacgtgttagagagcagccaggaaaatgaagatgaccatttttgggagcttctattccacaacaacaaaacatggaatctgaagcttataaaagttgaatgacagcagcattaaacatatatgtgaagagtccccgatgtttgtagaccttattagcctgaagataacagtgcacaaggtgggaaaagccagctcagaggtgacgttgccgagctactctgctctctatacctgttctctactgggactttttataaccctcaataactgttttttatttggtcttagggctgtctgatacttagagctgaaggcattccagctgacacagaggaatatttttctaagtgttaatgttctatatggtaattagggggaagaattatttcttttcacaagttaatatagggatggctgtttgtatcagccatggttctttctggtggaaaacagaattctccaactaaaaatattttaatggcagactgattacagtggtgtgggccagaaacaagggacagtgaaacacccagagacttgtatcagcaggaagccattg

SEQ ID NO: 8409 - DNA, 1011 bp, Homo sapiens
gagagcccgggctccaggcacagacgcgaggggacccggccgcgctgcccgccccgcgccgcctcccacccgggtcgagatgcgcggtcttcccctcagcgccctcctgggcagcggcctttcccctccgggtccgggttagcggccgcgggcgaccgcgcgctgtgtcccaggaggccccgcggccagctccgggcagaggcgccaggagctctctcgccccattccctgcgggcacaggtggggccgttaggggttgaccttggaagtaaaacgccttcaggaattaggtagaaaaggaccatccgttcatccaagatcatctcacctcccatgaagggaacggtcttctaaatgcagttttccttccagcagggtggatggggagcatcgctggctgacaggctggtcagaaaatgtgatgttctgaatcgtggattttcaggttacaataccaggtgggccaaaattatccttccaagattaatcaggaaaggaaacagtttggacatcccagtagcagttacaattttctttggggccaatgacagtgcactaaaagatgagaatcccaagcagcacattcccctggaggagtacgctgcgaacctaaagagcatggtgcagtacctgaagtccgtggacatccctgagaatcgagtcattctcatcacgccgaccccactttgtgaaacagcctgggaagaacagtgcatcatacaaggttgcaaactaaatcgcctgaactctgttgttggtgaatatgccaatgcgtgtttacaagtggcccaagactgtgggactgacgtacttgacctgtggaccctgatgcaggacagccaggacttctcatcttatttatcagatggactacatttgtctccaaaggggaatgaatttttgttctcgcatctctggcctttgatagagaaaaaggtctcttctctacctttgctgcttccttactggcgggatgtagcagaagcaaaacctgaattaagtctgctggga

SEQ ID NO: 8410 - DNA, 2061 bp, Homo sapiens
tctctctccctctctccctttccaaatgattcagaagtcgataagaccaggagaagtgaagatgtaacatgttatctgtcgctcctcttagctggcggagagaatttacatttaaagattagcagagtgagaaagagaaatctgccttttgttgtgtggggtgaggaggaggcatctacccctggccttgacgctatctcccatcacctctgctatccagacaggactcaccgagatcgtactgagaagcactccacaatgccagactcacctgtggatgtgaagacgcaatctaggctgactcctccaacaatgccacctcccccaactactcaaggagctccaagaaccagttcatttacaccgacaacgttaactaatggcacgagccattctcctacagccttgaatggcgccccctcaccacccaatggcttcagcaatgggccttcctcttcttcctcctcctctctggctaatcaacagctgcccccagcctgtggtgccaggcaactcagcaagctgaaaaggttccttactaccctgcagcagtttggcaatgacatttcacccgagataggagaaagagttcgcaccctcgttctgggactagtgaactccactttgacaattgaagaatttcattccaaactgcaagaagctactaacttcccactgagaccttttgtcatcccatttttgaaggtattgcacagttcactggtctgtaaagtattttaaaccatattgttgctaggtcataactgtgtgcttttttagtacatttaggggctctttgatttaatttaatggatgaaaactatctgaatcgattgtatttatgaccatttcctaagtagtctgaaaattacaaggagtgttttaaataattacctgaaaagaagtaaagtttgaagaagagtttagaagtctctttgaataaaggttttgttcatttttttggtcatatgagatatgttattttacattttgcttgtctttagagtgaacagaagattggttgagctttgtagttgttcaggatttttttatcctcctaattttatctttgtaacaacttaacgggaagatcagaccgtcatccttttgtgccagtgaagaagttgggagtaagtgacatgtccaaggtgtgcctggctgaggactgattgaggtgtgggattcgaaatggtttttaagtctctgctgtgagctttctgtctcctccaactgctgccgcttcagtaaagcaactggaaaacaaacaaacacaaagttcacaagagaaagaaggaacatttttattcagcatagcgggtagttaattcactgatggatactaaaataactggtagttttggtagaaaagcagattactaagatcccttttacttgggtaagcatattgcttgggcatagtggattctcaataagtttatactaacagtgggcttagcagattgataaatgtgaaagtttcatttgcactcccctttgaaggtcactttcaaaatgagcactcaaggaagcctctgatttaattatttgccaaggaggatttacctttctgtctggttcctagaactttgtttgggagacaccagaaatataactgatcagatcctgtgtgaaatttcatctatttttaaaactgtatcagacacataaggttcaagtaagtatccagaagcctagaaaggtttgtctgaaatgagccccaattctgaactttctggatattagtctttcctgttgttattattaaggtgaaatgaaatattctgctttgtgagtacctacaaaccagaaattagatctgtttgtgtggaaacccagattacaattatattcttttcgttcttttctaagttgtacatttaaggttaaaggtataatgtgttagtgttttctcccaaaatggcttatactataatactatattcttatttaaaagcaaattgtttgttgaacaatttgaacaagtttgttgagactagaatctttgcctttctcagaaagcgttgttttctgtaaagatttcatcatatgaatgccatttcc

SEQ ID NO: 8411 - DNA, 505 bp, Homo sapiens
gtaaagcctgcggggaggggacacgcttgcctctgcttgtctcctcctccctctaccctcgtcgttgctaatgcatgttttccagggtcgctcctggcttcgtaccccttatttgacactgacatgcccccccaccccccgttgtgtctcctctcccagatgctcaaggtgtcagccgtactgtgtgtgtgtgcagccgcttggtgcagtcagtctctcgcagctgccgcggcggtggctgcagccggggggcggtcggacggcggtaattttctggatgataaacaatggctcaccacaatctctcagtatgacaaggaagtcggacagtggaacaaattccgagacgaagtagaggatgattatttccgcacttggagtccaggaaaacccttcgatcaggctttagatccagctaaggatccatgcttaaagatgaaatgtagtcgccataaagtatgcattgctcaagattctcagactgcagtctgcattagtcaccgga

SEQ ID NO: 8412 - DNA, 723 bp, Homo sapiens
gagaaacctggatttaccggtcatcagtatttgctagaagaaggagaatacagggactggaaagcctggggaggttacaatggagagcttcagtctttacgacctatattaggtgatttttcaaatgctcacatgataatgtacagtgaaaaaaactttggatccaaaggttccagtattgatgtattgggaattgttgctaatttaaaggagactggatatggagtgaagacacagtctattaatgtactgagtggagtatgggtagcctatgaaaatcctgacttcacaggagaacagtatatactggataaaggattttataccagttttgaggactggggaggcaaaaattgtaagatctcttctgttcaacctatatgtttggtaaggagttatatttttgtatgagaatatttaactgaattctggatttccttaatgtgtgttcctggttcatgtaatagtaattgctatggaaaatattctgagtttatttttagcagtaattgctaataatctagaagaaaaaaactttttcaatgtgtttgttctattcatttccttttctccttcctttaaaaatttttaggattctttcactggcccaaggagacgaaatcaggtaactttaaaaatattcttttatattaatatataaagggccttccattgaaaagctgaacttatgtttcaaatgtcagacatttggggccgggtgtg

SEQ ID NO: 8413 - DNA, 525 bp, Homo sapiens
agtctctccgtttcagaggtgtagggcctttgtggagccttctcaataaaataatttgccactcttgaagtcataggttagcttttcaagacacttcctgcatctctgacctgttgcacctctgttatcttggcacctctgttatcttagcagcaagcacctgcctcagctgacccttgagccataacccataagctcctgaaaagtacatcaagtctaaagtgaaccagctaactcattaagactggaatcatgagcaacaatggagcagacctaacctttggttacatctcctgttttgtagctatccttttgtttggctcaaattttgtgccacttaaaaaatttgatactggtgatggaatgtttctccagtgggttctttgtgctgccatatggttggttgccttggttgtcaatctgatattacattgtccaaagttttggccttttgcaatgcttgggggctgcatttgggcaacagggaacattgctgttgtcccaattatcaaaaccattggttta

SEQ ID NO: 8414 - DNA, 553 bp, Homo sapiens
agtctccgctccgcgaatctcctccggccactgccgccgcggtcgcctctcacccgcccggccgctccagcccgaggcgccccgaccccgcgccactccgcgcccggccagccgcccgcagccatggggctcctgcccaagctcggcgcgtcccagggcagcgacacctctactagccgagccggccgctgtgcccgctcggtcttcggcaacattaaggtgtttgtgctctgccaaggcctcctgcagctctgccaactcctgtacagcgcctacttcaagagcagcctcaccaccattgagaagcgctttgggctctccagttcttcatcgggtctcatttccagcttgaatgagatcagcaatgccatcctcatcatctttgtcagctactttggcagccgggtgcaccgtccacgtctgattggcatcggaggtctcttcctggctgcaggtgccttcatcctcaccctcccacacttcctctccgagccctaccagtacaccttggccagcactgagtccctcctgctggccagacagaaggacgcgg

SEQ ID NO: 8415 - DNA, 2180 bp, Homo sapiens
cgcgccgggcgcagggagctgagtggacggctcgagacggcggcgcgtgcagcagctccagaaagcagcgagttggcagagcagggctgcatttccagcaggagctgcgagcacagtgctggctcacaacaagatgctcaaggtgtcagccgtactgtgtgtgtgtgcagccgcttggtgcagtcagtctctcgcagctgccgcggcggtggctgcagccggggggcggtcggacggcggtaattttctggatgataaacaatggctcaccacaatctctcagtatgacaaggaagtcggacagtggaacaaattccgagacgaagtagaggatgattatttccgcacttggagtccaggaaaacccttcgatcaggctttagatccagctaaggatccatgcttaaagatgaaatgtagtcgccataaagtatgcattgctcaagattctcagactgcagtctgcattagtcaccggaggcttacacacaggatgaaagaagcaggagtagaccataggcagtggaggggtcccatattatccacctgcaagcagtgcccagtggtctatcccagccctgtttgtggttcagatggtcatacctactcttttcagtgcaaactagaatatcaggcatgtgtcttaggaaaacagatctcagtcaaatgtgaaggacattgcccatgtccttcagataagcccaccagtacaagcagaaatgttaagagagcatgcagtgacctggagttcagggaagtggcaaacagattgcgggactggttcaaggcccttcatgaaagtggaagtcaaaacaagaagacaaaaacattgctgaggcctgagagaagcagattcgataccagcatcttgccaatttgcaaggactcacttggctggatgtttaacagacttgatacaaactatgacctgctattggaccagtcagagctcagaagcatttaccttgataagaatgaacagtgtaccaaggcattcttcaattcttgtgacacatacaaggacagtttaatatctaataatgagtggtgctactgcttccagagacagcaagacccaccttgccagactgagctcagcaatattcagaagcggcaaggggtaaagaagctcctaggacagtatatccccctgtgtgatgaagatggttactacaagccaacacaatgtcatggcagtgttggacagtgctggtgtgttgacagatatggaaatgaagtcatgggatccagaataaatggtgttgcagattgtgctatagattttgagatctccggagattttgctagtggcgattttcatgaatggactgatgatgaggatgatgaagacgatattatgaatgatgaagatgaaattgaagatgatgatgaagatgaaggggatgatgatgatggtggtgatgaccatgatgtatacatttgattgatgacagttgaaatcaataaattctacatttctaatatttacaaaaatgatagcctatttaaaattatcttcttccccaataacaaaatgattctaaacctcacatatattttgtataattatttgaaaaattgcagctaaagttatagaactttatgtttaaataagaatcatttgctttgagtttttatattccttacacaaaaagaaaatacatatgcagtctagtcagacaaaataaagttttgaagtgctactataataagtttttcacgagaacaaactttgtaaatcttccataagcaaaatgacagctagtgcttgggatcgtacatgttaattttctgaaagataattctaagtgaaatttaaaataaataaatttttaatgacctgggtcttaaggatttaggaaaaatatgcatgctttaattgcatttccaaagtagcatcttgctagacctagttgagtcaggataacagagagataccacatggcaagaaaaacaaagtgacaattgtagagtcctcaattgtgtttacattaatagtggtgtttttacctatgaaattattctggatctaataggacattttacaaaatggcaagtatggaaaaccatggattctgaaagttaaaaatttagttgttctccccaatgtgtattttaatttggatggcagtctcatgcagattttttaaaagattctttaataacatgatttgtttgcc

SEQ ID NO: 8416 - DNA, 835 bp, Homo sapiens; identical to SEQ ID NO: 6666

SEQ ID NO: 8417 - DNA, 602 bp, Homo sapiens
tgcaccagcaccaacgggaacagcctgcaagatcagtcttttgtggactctagcaagttctccagtgcagggtctctcccgggactggccttctcctgaacgatatctggcatgattgttcctcctatgtgaaagaattgccttgaagaattgtattaatgaagaggttggattctgctacagagagtaatctgatacaagtcccagagtggaacttttaactcaggcctttttaagaggaatcacaataactgcagatttttaaacaaacaaaatcaccgaccttgcaaatactgaaattggaagagggatctgcaagtgcagggtgttggttaaagttgtacctcccaagtatttgggggatatatttattctgtattgacaaaagcaaatccactttttctttttcttttttttttttaagcttaattctgcaatcatttgtcttttataaaccgtaaagctctatacaagggacactataaataagactccatgttttaatttatgatgtttttaaagctgtgtaaaggaagaatgaagtggtgatatttacaaaaaagtaaaaaaaaaaaaaaagaaaaaaaggaaaaaaaaaaaag

SEQ ID NO: 8418 - DNA, 3251 bp, Homo sapiens
aggtcggtgcgcgcttctcccgaggtggaacgggcggcagtcaagcgccggcgttctctgccgtcaccctttccttgccggccggcacttcggctgcagagttttgcccacgcttcgagacttagggagcagaatttgcccactcatctggtataactggttctgatggctgggaataaaggaagaggacgtgctgcttatacctttaatattgaggctgttggatttagcaaaggtgaaaagttacctgatgtagtgttgaaaccacccccactatttcctgatacagattataaaccagtgccactgaaaacaggagaaggtgaagaatatatgctggctttgaaacaggagttgagagaaacaatgaaaagaatgccttattttattgaaacacctgaagaaagacaagatattgaaaggtatagtaaaagatacatgaaggtatacaaggaagaatggataccagattggagaagacttccaagagagatgatgccaagaaataaatgtaaaaaagcaggcccaaaacccaaaaaggcaaaagacgcaggcaaaggcacaccactcactaatactgaagatgtgttgaaaaaaatggaggaattggaaaaaagaggtgatggtgaaaaatcagatgaggaaaatgaagagaaagaaggaagcaaagagaaaagtaaagaaggtgatgatgacgatgacgatgatgccgcagaacaggaggaatatgatgaagaagagcaagaagaggaaaatgactacattaattcatactttgaagatggagatgattttggcgcagacagtgatgacaacatggatgaggcaacctattaggcatgaaatttttcaaaaaatatttttatgatgcagcttctgaacatttggacagacttgatttgtattttatttctgataaggaataagtacttgtttctgttgttttggacaaatagttgttaccaaaatattcaaaaccactttgagtttacatactagttaccttaaaaattattccctgacactctgacattccttctaaacacctctgccatctctcttatgtactctcatgggtttttttgtatgatttgaatatgaatgtgcctaaagaatttttgctctcttaatctatgtatacatacttgaacaaatcattcttgcttaactgctgatcttttgtaaaactattgctagtcataatggatttctataacctgaaagttgatataatacagcacgtggagcactttaaaaacaaagaaacttgaaaataattttattttttacctttacatggtgtgttctagactactgcattatgactacataaacctacctgagctcttacaagtacagaattgtgagacagaggttttgtgatggaaaacatacacatagggaaaaataccaaactgagcaatataaatttcacagctcacatcttagccagtacaaagaaactttcacatggggtgaatattataatacttgaatttgagacttaatactgtatatgaattaatcatcccactgtaataactgacatcttcaaatagttgggcttatgaaaaatttgactaagacattttattttatactttatgtaaatgtgaaataagttctggtcatataaatatgtagaatgcatgtgtgtgaactctatgaagtgaagtgtggtggccttttatgtttcagagtactcaagtgtacaattgatttatataaaaatgcaaaatgaactcaggtcattttgaaattaatattaatatttttgttgtttaactttaaagctagctcccctaactttatatattttttgggaaaaaatacctaaaaacctcagcctacaaagactctcagaaatgccaaagattttcaaggaaattcatattatatatttcaaaaatgatttatcaatgttatctaccaaaagaaataattttatttttcccctttggggagatattatcctctaatatgagaatcagatccctagattctatttctacctatactattaaactcaaccttgaacctgagcttggttgtttctgtgccttagtttctccactcgtaaacaatttcctataaaaattgtttaaacaccaaccaaaatttaccatatgtattcattctcttgccttaaagatcacttcttaacttacatttggctctcaccctctaaaaatttgtagtttggagagtaactgaaagcacaattttaagaaacatgttttcctcacaaaatatattgtaatctgattttcctatcttgtattcatgcagaaaattggagaaaatgtgtattgtcttgtgccattctgcaatatgaatttctcaggaaaaagatgtttcaatggcaatactttcttaaataattcaagatgggtgtgaggacctatcttattagtttagtgctgtgttaaccatttgtgaattacttcttgtttaaaggaagttgtcaaaaaattttaagattctaaatggaatacacgaataaagtaagccttagaatagaaacctcacaaaaagttgtcatttgcggttgataattaacataggtgttttattctctcaactccttagtaccagagccaaatacaatttagttttcagaaatcttatcaatattgttctatttacctacttataaatctgcagataaccacttgaaccaggcaaatacactgaagataaaggttatttctttttttagctttgaatttgtcatgaccattttagtcttgcagatagcagggcagccccttggggcaaggatttactctgggaggtaccgttaagagccttctttccccctttgaaagatccttttacaatgttaaagtatactagttgcaagaacaagcaggatttgcaggttgctttaccagcatgagtctcatttttctggcttaaaatctgggactgtgaaattattccataggaaagtgaatgttattttgcagaattagcctcttacataaaagtatttgttgaagtgtctttaaaattgctatcatgagcaaaactggttgctgtaatgcttgtttttctgtatttatttacacattaaattcttacaaaacaaaatgtgttcgtttgttttatagtaagatgttttattttgaacttatttaaatgtttatttgttagagaaaactaatttgttaatatagatcttaactagtaactattaagcagggatgtttgttccaaatattcttgaataaacaatcaccacaaacaac

SEQ ID NO: 8419 - DNA, 851 bp, Homo sapiens
ctctgggagggtctcacggaactagtgacggcgacaggcaactatggcaactaccggcgtcggctggcagcctgtgtgggcttccgcttcccgatcctgggtgtgcacctcaaggacctggtggccctgcagctggcactgcctgactggctggacccagcccggacccggctcaacggggccaagatgaagcagctctttagcatcctggaggagctggccatggtgaccagcctgcggccaccagtacaggccaaccccgacctgctgagcctgctcacggtgtctctggatcagtatcagacggaggatgagctgtaccagctgtccctgcagcgggagccgcgctccaagtcctcggtgagggggtactccctcctctccactctgcccttccctcctgagaatcccaggatgtgaggatgggaagagctcttagcagccacctcacccatccatcttgtaggacagaggcatcctgggggtagggcagtagtgttgggcagacttccctctcccagggattcccctctctgttccccggggctctgggcttcccctgcctctggccctagctcaggcccgaccatttccatagccaaccagccccacgagttgcaccccaccaccccggcccccggtactggaggagtggacctcggctgccaaacccaagctggatcaggccctcgtggtggagcacatcgagaagatggtggagtctgtgttccggaactttgacgtcgatggggatggccacatctcacaggaagaattccagatcatccgtgggaacttcccttacctcagcgcctttggggacctcgaccagaaccaggatggctgcatca

SEQ ID NO: 8420 - DNA, 662 bp, Homo sapiens
agagaacgccggccaccttcccgcttccgagctgggtgcgcgccgagcacaggagattgcctgcgtttaggaggtggctgcgttgtgggaaaagctatcaaggaagaaattgccaaaccatgtctttttttctgttttcagagtagttcacaacagatctgagtgttttaattaagcatggaatacagaaaacaacaaaaaacttaagctttaatttcatctggaattccacagttttcttagctccctggacccggttgacctgttggctcttcccgctggctgctctatcacgtggtgctctccgactactcaccccgagtgtaaagtcttgctgctctgttgcccaggctggagtacagtggcaggatctcagctcactgcaatctccgtctctcaggtttaagcagttctcctgcctcagcctcccaaaaccttcggctcgcgtgcttctgagctgctgtggatggcctcggctctctggactgtccttccgagtaggatgtcactgagatccctcaaatggagcctcctgctgctgtcactcctgagtttctttgtgatgtggtacctcagccttccccactacaatgtgatagaacgcgtgaactggatgtacttctatgagtatgagccgatttacagacaagactttcacttca

SEQ ID NO: 8421 - DNA, 2409 bp, Homo sapiens
aagaggaaagaagcagagcttcgcagcggcatcatcagaaacaacagcctgtgggaccggctgatcttccacaaagtacagtcgagcctgggcggaagagtccggctgatggtgacaggagccgccccggtgtctgccactgtgctgacgttcctcagagcagccctgggctgtcagttttatgaaggatacggacagacagagtgcactgccgggtgctgcctgaccatgcctggagactggaccgcaggccatgttggggccccgatgccgtgcaatttgataaaacttgttgatgtggaagaaatgaattacatggctgccgagggcgagggcgagggctacttgaaggacccagcgaaaacagcagaagctttggacaaagacggctggttacacacaggggacattggaaaatggttaccaaatggcaccttgaaaattatcgaccggaaaaagcacatatttaagctggcacaaggagaatacatagcccctgaaaagattgaaaatatctacatgcgaagtgagcctgttgctcaggtgtttgtccacggagaaagcctgcaggcatttctcattgcaattgtggtaccagatgttgagacattatgttcctgggcccaaaagagaggatttgaagggtcgtttgaggaactgtgcagaaataaggatgtcaaaaaagctatcctcgaagatatggtgagacttgggaaggattctggtctgaaaccatttgaacaggtcaaaggcatcacattgcaccctgaattattttctatcgacaatggccttctgactccaacaatgaaggcgaaaaggccagagctgcggaactatttcaggtcgcagatagatgacctctattccactatcaaggtttagtgtgaagaagaaagctcagaggaaatggcacagttccacaatctcttctcctgctgatggccttcatgttgttaattttgaatacagcaagtgtagggaaggaagcgttcgtgtttgacttgtccattcggggttcttctcataggaatgctagaggaaagagaacactgccttacagtcacctcatgttgcagaccatgtttatggtaatacacactttccaaaatgagccttaaaaattgtaaaggggatactataaatgtgctaagttatttgagacttcctcagtttaaaaagtgggttttaaatcttctgtctccctgtttctctaatcaaggggttaggactttgctatctctgagatgtctgctacttgctgcaaattctgcagctgtctgctgctctaaagagtacagtgcactagagggaagtgttccctttaaaaataagaacaactgtcctggctggagaatctcacaagcggaccagagatctttttaaatccctgctactgtcccttctcacaggcattcacagaacccttctgattcgtaagggttacgaaactcatgttcttctccagtcccctgtggtttctgttggagcataaggtttccagtaagcgggagggcagatccaactcagaaccatgcagataaggagcctctggcaaatgggtgctcatcagaacgcgtggattctctttcatggcagaatgctcttggactcggttctccaggcctgattccccgactccatcctttttcaggggttatttaaaaatctgccttagattctatagtgaagacaagcatttcaagaaagagttacctggatcagccatgctcagctgtgacgcctgaataactgtctactttatcttcactgaaccactcactctgtgtaaaggccaacagatttttaatgtggttttcatatcaaaagatcatgttgggattaacttgcctttttccccaaaaaataaactctcaggcaagcatttctttaaagctattaagggagtatatacttgagtacttattgaaatggacagtaataagcaaatgttcttataatgctacctgatttctatgaaatgtgtttgacaagccaaaattctaggatgtagaaatctggaaagttcatttcctgggattcacttctccagggattttttaaagttaatttgggaaattaacagcagttcactttattgtgagtctttgccacatttgactgaattgagctgtcatttgtacatttaaagcagctgttttggggtctgtgagagtacatgtattatatacaagcacaacagggcttgcactaaagaattgtcattgtaataacactacttggtagcctaacttcatatatgtattcttaattgcacaaaaagtcaataatttgtcaccttggggttttgaatgtttgctttaagtgttggctatttctatgttttataaaccaaaacaaaatttccaaaaacaatgaaggaaaccaaaataaatatttctgcatttc

SEQ ID NO: 8422 - DNA, 676 bp, Homo sapiens
agagaaccacatactatgtaacctcctttttctgttctgtcccagcgatcatagaagccattgagatcccgcagtttatcggccgcagttacctgacgtatgacaacccagatatcttgaagagggtgtcaggatcaagatcaaatgtgttcatgaggtttaaaacaactgccaaggatggccttttgctgtggaggggagacagccccatgagacccaacagcgacttcatttccttgggccttcgggatggagccctcgtgttcagctataacctgggcagtggtgtggcatccatcatggtgaatggctccttcaacgatggtcggtggcaccgagttaaggccgttagggatggccagtcaggaaagataaccgtggatgactatggagccagaacaggcaaatccccaggcatgatgcggcagcttaacatcaatggagctctgtatgtgggtggaatgaaggaaattgctctgcacactaacaggcaatatatgagagggctcgtgggctgtatctctcacttcaccctgtccaccgattaccacatttccctcgtggaagatgccgtggatgggaaaaacatcaacacttgtggagccaagtaacaccagctggccttgtccaagggacagagccttctattctgagaatcccaggggccctcagaccc

SEQ ID NO: 8423 - DNA, 882 bp, Homo sapiens
gactcctcagagctgcttctcgatgtgaacgaaaacgggaagaggcgaactccagacagatgaataaactgaggtccagagaggttaagtgacttgaccaaggtcacacagctagtcatggaagagccaggactagatctcaggtctcttgattcccagtccagtgctctttccactacaccacaatgccagtaagaaccaaagaaaatggctttgacagagagcctttgcactcagaacatccaagcaagcgaccatgcactattagcccaggccagcggtacagtccaaataacggcttatcctaccagcccaatggcctgcctcaccctaccccacctccacctcagcattaccgtttggatgatatggccattgcccaccactacagggactcctatcgacaccccagccacagggacctcagggacagaaacagacctatggggttgcatggcacacgtcaagaagaaatgattgatcacagactaacagacagagaatgggcagaagagtggaaacatcttgaccatctgttaaactgcataatggacatggtagaaaaaacaaggcgatctctcaccgtactaaggcggtgtcaagaagcagaccgggaagaattgaattactggatccggcggtacagtgacgccgaggacttaaaaaaaggtggcggcagtagcagcagccactctaggcagcagagtcccgtcaacccagacccagttgcactagacgcgcatcgggaattccttcacaggcctgcgtctggatacgtgccagaggagatctggaagaaagctgaggaggccgtcaatgaggtgaagcgccaggcgatgacggagctgcagaaggccgtgtctgaggcggagcggaaagccc

SEQ ID NO: 8424 - DNA, 2861 bp, Homo sapiens
ggaaggagcttcagccgccagcccggaacgcatcataggttagcttttcaagacacttcctgcatctctgacctgttgcacctctgttatcttggcacctctgttatcttagcagcaagcacctgcctcagctgacccttgagccataacccataagctcctgaaaagtacatcaagtctaaagtgaaccagctaactcattaagactggaatcatgagcaacaatggagcagacctaacctttggttacatctcctgttttgtagctatccttttgtttggctcaaattttgtgccacttaaaaaatttgatactggtgatggaatgtttctccagtgggttctttgtgctgccatatggttggttgccttggttgtcaatctgatattacattgtccaaagttttggccttttgcaatgcttgggggctgcatttgggcaacagggaacattgctgttgtcccaattatcaaaaccattggtttaggccttggaatcttaatctggggatcatttaatgccttaactggctgggcaagctcaaggtttggctggtttggattggatgcagaagaagtatcaaatccgctgctaaattacattggagctgggctatcagtagtaagtgctttcatatttttgttcatcaaaagtgaaataccaaataacacgtgttccatggataccactccattaataacagagcatgggctgcagtcttgcagtgatatctggagtactctatggatctacatttgtgccaatcatctacatcaaggaccacagcaaaagaaatgatagtatatatgcaggggcaagccaatatgatttagactatgtgtttgcgcacttcagtggcatctttcttacaagtactgtctactttctggcctactgcatagccatgaaaaatagtcctaaactatatcctgaagcagtcctaccaggattcctgtcaggagtactttgggctatagctacctgctgttggttcatagcaaatcactctctgagtgctgtggtcagttttccaataatcactgctggtccaggatttatagctgcaatgtggggtatcttcatgtttaaggaaataaagggtctacaaaactacctattaatgatacttgcattttgcatcatcttgactggagccttatgcactgctttttctaaaatctaacaatgacaaaaccagcaggtggcagcagtagttaagagaacgcgtctatcggacagcggagagatcatgctgagaaaagagtgcattttcatatagcaaatggatctcagccactgttggagtgggtaaatgatttttttccccaaaaatgtgagaatgaaggaagattgagtttcattcaagtataaaaatgaaaatttcttctgatgaactgtttatgaaggtagtactttactgggtgactaaaatgtctacattattatagcattacatacgaggatgctctttttaccacagtatgtacctagtgttgcataatctagaacacagtatagagtccatatacaaagaagttacagtccatatttctcacctattaccccagtgaagtgaggcagaaataccttgggcgaggagggagagccttaccttctaatggaattagattccaaagatatttggatcctttgtttcataaagtaaatgcatagttggtaactaaatgttaaaaaggccattttattattgttagccaaaacttctgtttatttcaagttaatatcgcccaactctacatcatctacccattttagctcataatgcttttgattatcgccagataaagtccattctcagagaacaaaaatttttcatcattgagaaaatgtgcataacataatacatacatacacaagtatattcacgtacataaatacacacagatatgttgctaaagtgagattgtaggttatcagtaacaatttaaaggaaacaaccactcttttgaatgtacaacttttttttctgaaatacacttttctaaaaccctcttaactggaggtttcctgttttcttcttgttttaactggtggtttccagtaggcaaaataaaatgacaggcatgctagttttttttttttttttttttttttaagaaaactgaaattaagccaggcagggtggcgcactactataatcccagctgctggggcggctgaagtaggagggtcacttagcccaagagtgcaaatctgccagcctaggcaacatagcaaggtcccatctctaaaaaagaaatttaatttaaatttgtaagaaaaaagaaaactgaaacagaactgccagtacaatgtttgttgcaattgtttccaaaactttgagataacgaaacccctattcaaatgtaaattttacccattcccacctgatagtactgtttattactttgctatgcaggagaaacaaaacagctttttatttgtgtgtatactctgaagtcaatgtgcatgggttaaatcccacctctgcttcattttatttgtgtggctttggacaagttcctaagccctctgtgtcaggcccctcattaacaaaatggagtttatgatggcatctacctcacatggttattgtgtggttgaaattagttcaaatctgtaaagtatgttgatgagtatctggtacttggcaaacactatataattgttagctttattattatgtgttgtttgaaggggaaaaaagtttttgtagattggagaacaccatgtaagagctactaagctcaccaccttcccatccaaacaattattactcctctaaatgaatactacttaaaagtgatggagcttctgtttgtttattgaattgctaatacaaataaatatttgactataa

SEQ ID NO: 8425 - DNA, 594 bp, Homo sapiens
ggtgcttgaagggagtgttccgtcgtttccgttgccggctgtttgcagtggggaaaccgaggcagctcctgctccccctagttcttccgctcctgtgaggtggctgctgtttcttttcctcttgccccggatgcctcggtgcggctgcactgagagcgcgcgggctcgcgagccccgcggggttctgcgggaacccgggggcgcctgggccggcgggtctttgtgcgagccctgccctcccattcgcgggcggcgcgcgaggggggtcggcgcagagacgcccagagccctggggtgctcaggcgccgctacgcgtgcatcccctctgctcggcagttctgcgcttttgtcctaatgagcgcggactagatggcttgattttcaagataatgatcaacccagctgtgctatgcgctctttctgcactgacctgcgggtacttcgaacttcgacagtccctcctcaggccctagtccagaggaaaaaaaaatgtttatttctttgtgggagttcttctatgggcacttttttcgattttggatgaaatggctattacgacagatgactgggaagtgtgaattgcagcgaatattt

SEQ ID NO: 8426 - DNA, 730 bp, Homo sapiens
ctgcccgggctccacgtgcggagtgggtgccccctaggccggggagcgggggatccccaggggtcgcggggccctggaggagcgggcatcggacgcggacacggcggggtgcatcccgagggccccctccgaggcagatgcttcctgcgggggcgctgttcctgggcccgggaagggggcgttggaaccccgagcggtccgggccgaagcctgggactctcagcagactctgcaggtcctctcagatcttgtgcggaaggccaggagtcggaacattggcatcttccatccatccttcaacttaagcaagttcctccgacagggtctctgcaaatgcctcccggccaatgtccaccagctcatctccggcaaaataggcatctctcttaccagagtgtctgatggggaaaacgttctggtgtctgactttcggtccaaagacgaagtcgtggatgccttggtatgttcctgcttcatccccttctacagtggccttatccctccttccttcagaggcgtgcgatatgtggatggaggagtgagtgacaacgtacccttcattgatgccaaaacaaccatcaccgtgtcccccttctatggggagtacgacatctgccctaaagtcaagtccacgaactttcttcatgtggacatcaccaagctcagtctacgcctctgcacagggaacctctaccttctctcgagagcttttgtccccccggatctcaag

SEQ ID NO: 8427 - DNA, 291 bp, Homo sapiens; identical to SEQ ID NO: 6525

SEQ ID NO: 8428 - DNA, 3839 bp, Homo sapiens
ctctccggccgcgcagccgctgccgcccacccgcacccgccgtcatgctccgggccgcgctgcccgcgctcctgctgccgttgctgggcctcgccgctgctgccgtcgcggactgtccttcatctacttggattcagttccaagacagttgttacatttttctccaagaagccatcaaagtagaaagcatagaggatgtcagaaatcagtgtactgaccatggctggagtgcagtggtgtgatctcagctcattgcaacctctacctcctgggttcaagcaattctcctgcctcagcctcctgagtagctgggattacaggagcggacatgataagcatacataatgaagaagaaaatgcttttatactggatactttgaaaaagcaatggaaaggcccagatgatatcctactaggcatgttttatgacacagatgatgcgagtttcaagtggtttgataattcaaatatgacatttgataagtggacagaccaagatgatgatgaggatttagttgacacctgtgcttttctgcacatcaagacaggtgaatggaaaaaaggaaattgtgaagtttcttctgtggaaggaacactatgcaaaacagctatcccatacaaaaggaaatatttatcagataaccacattttaatatcagcattggtgattgctagcacggtaattttgacagttttgggagcaatcatttggttcctgtacaaaaaacattctgattctcgtttcaccacagttttttcaaccgcaccccaatcaccttataatgaagactgtgttttggtagttggagaagaaaatgaatatcctgttcaatttgactaagtttttggtaatcttgcactaagacatcaacaaaatgccctggcagagataacttgggaaagattttaatataaaacttgacattggatattagagctttaatggtattccttattccagtaacatttttatgtactcatctgctgtgaaaagtctttaggttcattaaaaaaacaggttttagaaatgatcttagatctaatatagtgattttaagcatcccgtcaaaggcagaatctgtcacttgaatgaaggaaagcttaaagcccaagcagataaaaataaaagcccagcctatttgtcttgcctgctgtatcttccctatttagttgacccactttagtttatatgtttattagtaaacatgaaatggggaataagtgattttaagtacatcccatacatttaaatatctttgataattgttatttttttggcagataattcctctagaatgtgtatctttttatgatttagatgaagaaaattttacaacttttaacaccccacaccaattttagtttcattacttttacacacaccattttatcacaaatgactcaagttttaatgaatgtttataaattatttgaaacaaaatatgatcgctgtgtccaggatggcatagagaaagctggcaattaggttaacacttacatattatagtgcccctttaaggatttctctcttgccaccataccttttgtactttcccctatacaagatgtatctcattctcctcaagcatttataaatttttccttcaatgacatgaaaactgtgcaagcaaaaaccgaagaaaaacacttaagtacaactgtagtgacagtgatcaaagttttcagtgcatttattgtacattttaagaaaaaggtgaaaatcatttggggagtaaaaaaatgaaaaagctgaaacgagtaattttcctcaccatcaataaaccaaaaacaggaaagataaagaatgtataaatttcacgtaaattagtcacgtatcacttatcaatggggatacgttctaagaaatgcatagttagggaatcttgtgtgaaaatcagcttgtatttacacaaacccagatggtagagcctattttgtcccaaacctacacagcatgttactgtgctgaatactgcagacaattgtaacacaatatttgtgtatctaaatatagaaaaggtacagtaaaaatatggtctactaaggaaacactgttctatatgtggtccattactgactgaagtatactgtctagaagtctgaggctcaaagaaaagtaatccctcttctgaatccacaccccatcaattatcttactttcttctggggagatagatagatatactatctcactagcttgactaatggcaacaaagttccagcttgtgtagtctctttttattgaccacatgaatcgaaaacactcatcacaattaatggcactatcattaatgagacatgagtaactaaaaagtgatagaaaactattaacagtgcggctacatggtactgaaaatgcaggcattacaccagctgttacacaagcacaagcatgctctgtaagagctttacatttctgagattttgtatagtgattgagatgtctattttattattgatagactattactaatgtcaatattgaacactaccctggaattcctgcctggttttcctacccaaattgtaccactccttgaagaactacaggcacagtaaaaaaaatatggcgtattatgtgaactaaaagagttctaaaggagttcttaaaggagtggtagaatttgggtaggaaagtgattaagtccaacttaaaaccaacagtctcaaacgtctacaactacaatgtccaatgagccactagccacatgaggctatttaagtaaatttagtttaaaatccagttttcgaattacattagccacattgtcaagtgttcaaatcacaggtggttagtggctactgtactgggcaacatacattatagaacattttcattataggaagttttattgggcagtgctgctcttaaatcctaccttccactcaactcccatacaactttcttttgtacattttgatactttctacctaatggcagctcttccaaaatagctgctttaaactctgatttaattttcaatatttggtttcatttttcaacaggccaagaggcctctggtaatgaagtgctatatatatatatatgatggagtctcactgtgctgcccaggctacagtgcagtggctcgatcttggctctctccaatctccgccttgcaggttttcaagcaattctcctgcctcagcctccttagtagctgggaccacagacatctgtcaccacacccagctaactttttgtatttttggtagagacggggtttcgccatattgactgggctggtctcaaactcctgacctcaagtgatccacccaccttggtctcccaaagtgctgggattacatgcgtgagccaccacacttggcctacattttttctttatataccagaacatctataacaggcaccttatctactcattagtgaagagataattggattacacaggcaggcttgtttactacatccagaatgtagaaactgctttcttcaacatcttggttctagctagtaataacaatataattctttggcagatattcagaataacattttaaactacattttcttagaaaattgcattcttgtagtgagcagtgtatggtctcttttgttcagaatttaaaactgataaccaatgaaagccttttctcttattcctctaccgtcatttacatgataatctgaagctaatatgacaatatttaaatactaagtggtactagggaactacaagaatactgtaaagcttaagccattgttatcactgtcatttagcatttaataacaaaactatacagaattatgtgcataccaatgaatgttttgtaccatctagttaaattttttaaataaagttttatgggttaagcag

SEQ ID NO: 8429 - DNA, 1491 bp, Homo sapiens
attcccttctgcctttctcggcgacgataaaaggctttgctctggcaataggaatttagaaaaaaagaaaaagctgcgctaaactccaccgtgacctcaaactctttggactgtttgaaaaaaaaaaaattggaagaaaatccatcctccaagagaatcggcataggaggagatggaagttttcccctttctcttggttttgtccgtctggtggtctcgaacctgggactcggcgaatgcggattcgatcattcacatcggagcaatttttgatgaatctgccaaaaaggatgatgaggtatttcgcactgcggttggtgaccttaaccagaatgaggagatcttacagactgagaaaatcacattttcagtgacgtttgttgatggcaacaaccctttccaagcagttcaagaagcctgtgaacttatgaatcaaggcatcttggccctggtcagctccattggctgcacgtcagcaggatccctccagtctttggcagacgccatgcatatcccccacctcttcattcagcgctcaacagctgggaccccaaggagtggctgtggactcacccggagcaacaggaatgatgactacactctctcagttcgcccacctgtctacttgcatgatgttatcctaagagtggtcacagagtatgcctggcagaaattcattatattctatgatagtgaatacgatatccgtggaatacaggagttcttggacaaagtctctcagcagggaatggatgttgcacttcagaaggtagaaaacaacatcaataaaatgattaccactctctttgacaccatgagaatagaagaactgaatcgctatcgagacactcttaggcgagcgatccttgttatgaatcctgctacagccaaatccttcattactgaggttgtggagactaatttggttgcttttgactgtcactggatcattataaatgaggaaataaacgatgtggacgtacaggaacttgtaagaaggtcaattggaaggttaacgattattcggcagacatttccagttccccagaacataagtcagcggtgtttccgtggcaaccatcgaatatcttcaacattgtgtgatccaaaggatccatttgctcagaatatggaggtatattataaatgacaggatatttcttccagggtgctttgttgggcaattgcaaggagagctttatgagttgcattggattcagaattatacgtgttatttctgaacaattctcctccagcaatttcataagtctaatggggagaaagtgctaagaatttgcgtctttgttctttttgatctcattatagaaaaatttctacttgcttaataaaaaaatataataagtaaaggttattttcttctaaacaagtaggtccataacatttcccacaggagaatttgtaattggtactcctttttccaaactctaaattattaaactaataaatgtgcttgacttttctggcctaaga

SEQ ID NO: 8430 - DNA, 2433 bp, Homo sapiens; identical to SEQ ID NO: 3110

SEQ ID NO: 8431 - DNA, 3501 bp, Homo sapiens
tctttggaccgcgccggacttggcctcaggaaatcaaccaatgctgcggaaggcggctggtgcacaacgctctgctctacagaagggggtcccccaccctcttttccaattttttttttttggccttcctctccttccctccctcttcctccctctctctctctctctctccactacccccctctttcttccccactcggctcctctcccccctcgcgcccacagcgtttggtgttgattcgagcgggaagaggggggtgggtgggatcggtgggggagaccatgacctccagctacgggcacgttctggagcggcaaccggcgctgggcggccgcttggacagcccgggcaacctcgacaccctgcaggcgaaaaagaacttctccgtcagtcacctgctagacctggaggaagccggggacatggtggcggcacaggcggatgagaacgtgggcgaggctggccggagcctgctggagtcgccgggactcaccagcggcagcgacaccccgcagcaggacaatgaccagctgaactcagaagaaaaaaagaagagaaagcagcgaaggaataggacaaccttcaatagcagccagctgcaggctttggagcgtgtctttgagcggacacactatcctgatgcttttgtgcgagaagaccttgcccgccgggtgaacctcaccgaggcgagagtgcaggtgtggtttcagaaccgaagagccaagttccgcaggaatgagagagccatgctagccaataaaaacgcttccctcctcaaatcctactcaggagacgtgactgctgtggagcagcccatcgtacctcgtcctgctccgagacccaccgattatctctcctgggggacagcgtctccgtacaggtgaatgactggcccactctcccttgctccacttccacatgtttctcagcggtcggtcatgtttcaagctgcttgtgcagctcaccgacatttcttactgggttaatctcttcagagacattcaacttgctgacatccccacattttcccaggagattataagctgccccagcagcagggtttggggcagaagtgagaggggcaggctatctcaccaatctcctcttggactcaggaactcttgcaaaggtttcaaagatgaggaagaatctaaaagaaaagatcattaagctgtgcccagtgttcctcttgcaacaattctggaacaaaactttaccctgtttccaaatttaagctaaattcgttgtattatgcaaatgtagggacgtaacttgtaaaactccaagtatagggccaaaggcaaactttgcagtaaaactggctttgaattaaaaaaaggaagaaggaaggaaggaagaaagaaaggaaagaaggaaggaaggagagagacgagagggactatgacagagagaggaggaaagaaaagccaagttcattctgatcactttcatggccaaggttctttgttagtaggtgtgaatttcttataatgccaaatgccttcctaatctattgctaattcttgtctacttgtctgaagttttctctggggatcagtttgtgtgtatttgtgtgtgtgcgtgtgtgtgtgtgtctgtgtgtgtttcttttaaataaaaaaggaatgtataatttacactaaacttttatattaaaaagttgaacatttttaaagaaacaaatatcagagtactatttcaatctcataaagaggcttttaacctcccattattatgctgttcagaaaatataggctgccagaagggaagctgagacacaaattcctaacccattggattagtctagagtgactttctttgaaaatatacctgagtactctgagaaaccaggccaagcctacgtgttctccctggctgatttcagtggaggaagaactattcaaaaattcatttattatgcttttgtttacctttttattgtcaaggttaattattggtttaaggagaggttttaaatgaaatataggagattatgtctcagatgaagttgaatttctgacatgaaatgctacatttttgaaatgcaagtgtttttcaaaggttcttagctttaatcaaagcaaaaagcctcatctaaaagtttctttctgttccaaatcagttcctttagagaaacatggtaaatgcacttggaaatttgttttaatcccctgttataaaattagcctgaattctttttgtcttagcacatagagaccctacatctaggaaagtcttattctgggccctattgcactcagatgtggtgtgccttactgatcttgaaacattagttatatctgtgtgccctattttaaatttaaactcctctcctataagatttactacaaatacattttttgaagaccactgtaaaatcacatattctctaatattttaaataaatgaaaggctgctttatttctcttataaacattggtataagagaaatttggtgtgttcatgaacacgctaaatggcttggaaaatgggtgtggttcaaagcctgatgcttcaagatctctggtttgaatttggtcacaaccaggaagtattgcccctttttctgtctgggtcctccataggaacttttcataccagccataaacaatccagatggctgccacgtggtccttaccagtgagaggcgtcacacagcacacactgcatgaatggggatgaaatcattcctgaattaatatagggttatattacttggacctcagccatttgagcctcagtgtctgcatcatatgtgtttagtatatggacatctaactgaaattattaacgtggcaatttatgcgtgccttttttggaaatattctattttaatggaaagaattatgtagaaatactggatacatttttaaaaacatccataattcaccatcttgacataactagtatattcatttttgtgattagagttcaatgttttatatagatgtagctttagtgtatatattattttgtattctgctcttttcacttaaagtcatatgacctagtacattttactcatttcttggtatgcttttatatcatttctctcttagaaattggatttgtaaaaattaatttagaaaatcataaaatctgttcatattctgtatgaagaataaattaatcttcagatataagcagaaaagtgatgttaaaacaataatttaatcaataataatgttttttgatccaatgttgactgaagtgtttatattttggttgatttctaaaagtagcaaaaagctattctgttatttggagaattttctgctatgtttagaaccaaactatgttatgatttcacactttgaagcttgataggaaatattgttaaggaaataaaaaagaaaaacaagtgatccaaagcaaaggaaatgatagacttttgtgttatgaaaaattaactcactgttcttgttggtactattatgtcaagttagttatctcacatgtgacactcattaaaaggcatttctcttggttaattcttggaa

SEQ ID NO: 8432 - DNA, 613 bp, Homo sapiens
aggagaggagaggagagctgaacagggagccacgtcttttcctgggagggctgctatctaagtcggggctgcaggtcacagcggagtgaatcagctcggtggtgtctttgtcaacgggcggccactgccggactccacccggcagaagattgtagagctagctcacagcggggcccggccgtgcgacatttcccgaattctgcagacccatgcagatgcaaaagtccaagtgctggacaatcaaaacgtgtccaacggatgtgtgagtaaaattctgggcaggtattacgagactggctccatcagacccagggcaatcggtggtagtaaaccgagagtagcgactccagaagttgtaagcaaaatagcccagtataagcgggagtgcccgtccatctttgcttgggaaatccgagacagattactgtccgagggggtctgtaccaacgataacataccaagcgtgtcatcaataaacagagttcttcgcaacctggctagcgaaaagcaacagatgggcgcagacggcatgtatgataaactaaggatgttgaacgggcagaccggaagctggggcacccgccctggttggtatccggggacttcggtgcca

SEQ ID NO: 8433 - DNA, 2285 bp, Homo sapiens
acggggccgcctggagaggtgctgggagctgggtggagcttagaggaattaaactttggccctgcgcctcgtccagcctaggttccacccttttctgggaacaatgaatctcgctgtgttgtccaggctggagtgcagtggcaccatctcggctcactgcaacctctggctcccaggttcaagcgattctcctgcctcagccccctgagtagctgggattacaggcacgcgccaccactcccaggctccggtagattgcaaatgacctgctttctttctgttcccgggcgtttggacccctgtcttggaccgctgtcggatagtaaatcccaagtaaggtacctgccgtcggcagatttgagctttcttcttggacacctaatacccagagtcctccaggctccggtagattgcaaatgacctgctttctttctgttcccgggcggcatcggacccgtcggagagtaaatcccaagtaaggtacctgccgttggcagatttgagctttcttcttggacacctaatacccacagtcctccaggctccggtagattgcaaatgacctgctttctttctgttcccgggtggcatcgacccgtcggagagtaaatcccaagtaaggtacctgccgttggcagatttgagctttcttcttggacacctaatacccacagtcctccaggtgagtcctaaggatcttaggatacgcgatgggggtcctaaggcagggggggaagaggggatggctgtcacccaacccaaaatgggcggcctttatgttcaggttttgcccaagagtcagcttatttgcttcttgtactatcagggcagttgatgccacggccctcaaacatgaggggccatcctttagaaaccctctctagttgtttagacaactaggccaccggcctcagccagggccccagagtttcggttaaaagtccagctgccatcttttctctatctgacgcattcaatggaaaaggctttgtcagatcgggtagccccagggctggggctgccagaagtttttcctttaactcctgaaagactttttgttcttgggatccccattccaaaggttccgttccccgccccctttgtgacctcatacaaaggcttggctaatactgcaaagtttgggatccagtctacaaaaccccacagctcccaagaattcccttacctgccttctgcccttaggctccggtagattgtaaataacctgctttctttctgttcccgggctgcgttcggacccctgtcggatagtaaatcccaagcaaggtacctgccgtcagcagatttgagctttcttcttggacacctaatacccacagtcctccaggctccggtagattgcaaatgacctgctttctttctgttcccgggctgcgttcggacccctgtcggatagtaactcccaagtaaggtacctgccgtcggcagattggagctttcttcttggagacctaatacccacagtcctccagaaaaacaaacaaagacatggatttactgtgcatattagcagatccatactggaaaatgcatggaggtttcatatacaccacttacagttttcagctcctcagtagtgacaaagccatacccatcattgtcgattcgatcaacaatcttccctagcctctccttgctctcgtccggggtgagctcgtcgaagttcttggagtcctccttgcccaggaaggcctcgtggtcgtactggaagctctggttgtcctcagggggccgctcgcccagctccgagtcgggccgcaccacgcgctctttgcgcaccgtgggcttggcccgcagaacccgcggcgccagcaccagcgccagcagcagccccagggctaaccccaggcggccaccgcgcgccatcgtcccgaggagagggcggccgggagggagacgctgagcgagcgacaacagcggcagctcgggaatgggggctcggagcgcggcggccaagttttatgttatgtatattttacaagtaaaaaaattttttcacctcagcctgaactgaacactagctgacagacgttttgatttctttgaccatcacggaatcgtggccaagcgcggtggctcacatctgtaatcccaacactttgggaggtcaagatgggcggattgcttgaatccaggtgtttgagatcagcctgggcaacatgacaaaaccctgtttctagtaaaaatacaaaaattaaccaggctcaagccatgaccatgcaccattgcactccagcctaggcgacagagcaggaccctgtctc

SEQ ID NO: 8434 - DNA, 5042 bp, Homo sapiens
gtttcagatttgggatattggtgtttctgttttggagaaattattctttttctttttaatttgaagaaaaatcatcagtcttggaatacagaagagaaactagaaatatacgtattttgtttcacatttgaacagtcattcttgaggaatactccatacctgagtagacagccatgtggccatcgcagctactaattttcatgatgctcttagctccaataattcatggtggcaagcacagtgaacgacatcctgcccttgctgctccattgcgacacgctgagcgcagcccaggaggcgctcttccacccagacatctgcttcagcagccagctgcagagcgcaccgctgctcatcgtggacaagggccccgtggagctaccagaggagttcgcggtccaggtgcccaaggagcacagattgcagcgcaagctttcagccgtgccccaattccaatggctgtggtccgcagagagctatcctgtgagagctatcctatagagcttcgctgtccaggaacagacgtcatcatgatagaaagtgccaactatggcaggactgatgacaaaatttgtgactctgaccctgctcagatggagaatatccgatgttatctgccagatgcctataagattatgtctcaaagatgcaataacagaacccagtgtgcagtggtggcaggtcctgatgtttttccagacccgtgtccaggaacctataaataccttgaagtgcagtatgaatgtgtcccttacaaagtggaacaaaaagtttttctttgtcctggactactaaaaggagtataccagagtgaacatttgtttgagtccgaccaccaatctggggcgtggtgcaaagaccctctgcaggcatctgacaagatttattatatgccctggactccctacagaactgataccctgactgagtattcatccaaggatgacttcattgctggaagaccaactacaacctacaagctccctcacagggtggatggcacaggatttgtagtgtatgatggagctttgttcttcaacaaagagcgcaccaggaacatagtaaagtttgatttgcggactaggataaagagtggagaggctatcatagcaaatgccaattaccatgatacctccccttaccgatggggaggcaaatctgacatagacctggcagtagatgagaatgggctatgggtaatctatgcaacagaacaaaacaatggtaaaattgtcattagtcaattgaacccttacaccctacggatcgaaggaacatgggatactgcatatgataaaaggtcagcttccaatgcctttatgatttgtggaattctgtatgtggtcaaatctgtatatgaggatgatgacaatgaggctactggaaataagattgactacatttacaacactgaccaaagcaaggatagtttggtggatgtaccctttcctaattcataccagtacattgcagctgtggattacaaccccagggacaacctactttatgtatggaataactatcacgtcgtgaaatattctttggattttggacctctggatagtagatcagggcaggcacatcatggacaagtttcatacatttctccgccaattcaccttgactctgagctagaaagaccctctgttaaagatatctctaccacaggacctcttggcatgggaagcactaccaccagtaccacccttcggaccacaactttgagcccaggaaggagtaccaccccgtcagtgtcaggaagaagaaaccggagtactagtaccccatctccagctgtcgaggtacttgatgacatgaccacacaccttccatcagcatcgtcccaaatcccagctctcgaagagagctgtgaggctgtggaagcccgagaaatcatgtggtttaagactcgtcaaggacagatagcaaagcagccatgccctgcaggaactataggtgtatcaacttatctatgccttgctcctgatggaatttgggatccccaaggtccagatctcagcaactgttcttctccttgggtcaatcatataacacagaagttgaaatctggtgaaacagctgccaacattgctagagagctggctgaacagacaagaaatcacttgaatgctggggacatcacctactctgtccgggccatggaccagctggtaggcctcctagatgtacagcttcggaacttgaccccaggtggaaaagatagtgctgcccggagtttgaacaagcttcagaaaagagagcgctcttgcagagcctatgtccaggcaatggtcgagacagttaacaacctccttcagccacaagctttgaatgcatggagagacctgactacgagtgatcagctgcgtgcggccaccatgttgcttcatactgtggaggaaagtgcttttgtgctggctgataaccttttgaagactgacattgtcagggagaatacagacaatattaaattggaagttgcaagactgagcacagaaggaaacttagaagacctaaaatttccagaaaacatgggccatggaagcactatccagctgtctgcaaataccttaaagcaaaatggccgaaatggagagatcagagtggcctttgtcctgtataacaacttgggtccttatttatccacggagaatgccagtatgaagttgggaacggaagctttgtccacaaatcattctgttattgtcaattcccctgttattacggcagcaataaacaaagagttcagtaacaaggtttatttggctgatcctgtggtatttactgttaaacatatcaagcagtcagaggaaaatttcaaccctaactgttcattttggagctactccaagcgtacaatgacaggttattggtcaacacaaggctgtcggctcctgacaacaaataagacacatactacatgctcttgtaaccacctaacaaattttgcagtactgatggcacatgtggaagttaagcacagtgatgcggtccatgacctccttctggatgtgatcacgtgggttggaattttgctgtcccttgtttgtctcctgatttgcatcttcacattttgctttttccgggggctccagagtgaccgtaacaccatccacaagaacctctgcatcagtctctttgtagcagagctgctcttcctgattgggatcaaccgaactgaccaaccaattgcctgtgctgttttcgctgccctgttacatttcttcttcttggctgccttcacctggatgttcctggagggggtgcagctttatatcatgctggtggaggtttttgagagtgaacattcacgtaggaaatacttttatctggtcggctatgggatgcctgcactcattgtggctgtgtcagctgcagtagactacaggagttatggaacagataaagtatgttggctccgacttgacacctacttcatttggagttttataggaccagcaactttgataattatgcttaatgtaatcttccttgggattgctttatataaaatgtttcatcatactgctatactgaaacctgaatcaggctgtcttgataacatcaagtcatgggttataggtgcaatagctcttctctgcctattaggattgacctgggcctttggactcatgtatattaatgaaagcacagtcatcatggcctatctcttcaccattttcaattctctacagggaatgtttatatttattttccattgtgtcctacagaagaaggtacgaaaagagtatgggaaatgcctgcgaacacattgctgtagtggcaaaagtacagagagttccattggttcagggaaaacatctggttctcgaactcctggacgctactccacaggctcacagagccgaatccgtagaatgtggaatgacacggttcgaaagcagtcagagtcttcctttattactggagacataaacagttcagcgtcactcaacagagagccctacagagagacaagtatgggagtaaagctaaacattgcatatcaaataggggcttctgaacaatgccagggatacaagtgtcatggatactctaccactgaatggtaaccatggcaatagttacagcattgccagcggcgaatacctgagcaactgtgtgcaaatcatagaccgtggctataaccataacgagaccgccctagagaaaaagattctgaaggaactcacttccaactatatcccttcttacctgaacaaccatgagcgctccagtgaacagaacaggaatctgatgaacaagctggtgaataaccttggcagtggaagggaagatgatgccattgtcctggatgatgccacctcgtttaaccacgaggagagtttgggcctggaactcattcatgaggaatctgatgctcctttgctgcccccaagagtatactccaccgagaaccaccagccacaccattataccagaaggcggatcccccaagaccacagtgagagctttttccctttgctaaccaacgagcacacagaagatctccagtcaccccatagagactctctctataccagcatgccgacactggctggtgtggccgccacagagagtgttaccaccagcacccagaccgaacccccaccggccaaatgtggtgatgccgaagatgtttactacaaaagcatgccaaacctaggctccagaaaccacgtccatcagctgcatacttactaccagctaggtcgcggcagcagtgatggatttatagttcctccaaacaaagatgggacccctcccgagggaagttcaaaaggaccggctcatttggtcactagtctatagaagatgacacagaaattggaaccaacaaaactgctaacaccttgttgactgttctgagttgatataagcagtggtaataatgtgtgtactcctaaatctttatgctgtcctctaaagacaaacacaaactctcagacttttttttttttaatgggatttttaggtcagcccaggggagaaagataactgctaaaattcccctgtaccccatcctttcttgtcctttcccc

SEQ ID NO: 8435 - DNA, 786 bp, Homo sapiens
gtggagctgccagagtaaagcaaagagaaaggaagcaggcccgttggaagtggttgtgacaaccccagcaatgtggagaagcctggggcttgccctggctctctgtctcctcccatcgggaggaacagagagccaggaccaaagctccttatgtaagcaacccccagcctggagcataagagatcaagatccaatgctaaactccaatggttcagtgactgtggttgctcttcttcaagccagctgatacctgtgcatactgcaggcatctaaactctcaaagatgaagacttttgtaaacgtgtatctttggctactgtggataaaacagttgaaactccatcgcctcattaccatcatgagcatcatcacaatcatggacatcagcaccttggcagcagtgagctttcagagaatcagcaaccaggagcaccaaatgctcctactcatcctgctcctccaggccttcatcaccaccataagcacaagggtcagcataggcagggtcacccagagaaccgagatatgccagcaagtgaagatttacaagatttacaaaagaagctctgtcgaaagagatgtataaatcaattactctgtaaattgcccacagattcagagttggctcctaggagctgatgctgccattgtcgacatctgatatttgaaaaaacagggtctgcaatcacctgacagtgtaaagaaaacctcccatctttatgtagctgacagggacttcgggcagaggagaacataactgaatcttgtcagtgacgtttgcctcca

SEQ ID NO: 8436 - DNA, 4429 bp, Homo sapiens
attcctagctcttgtaatctctgttacttgtacatttctgtttttctgcctgcccgcacttctttctgtgtgtctggcagcctgcctgtctgcctgcttatgcccatttatttactgtgacttcatgttctacgttttccatttgaggaaaattggtctgatgtctactggctacttcaatttgatccccccctcctttttttcgctcttttaagagcctgtgccgatggaggtgccaaccgcttatatgatatcaccgaaggagagagagaaagctttttgcctgaattcatcaatggagactttgattctattaggcctgaagtcagagaatactatgctactaagggatgtgagctcatttcaactcctgatcaagaccacactgactttactaagtgccttaaaatgctccaaaagaagatagaagaaaaagacttaaaggtaatatatacatgtatttggtggttattccaaggatgtgaaaacaatttgtgtttattttttcactcagctgaaatggatatttacttttgtgctttttctttttttttaaattgctgtcaggttttttttcccctgtagagcagataagtctgcacttagctgccaaaacattaacatgtgcacttaaaccagggaacacaaatgtaaacatcttacagtggcatggtaataaaatgggtgaactggaccgtgtgtcaagtaatcaaaactgggaactcattcttgcctgaaagcgactagctactattcgtctctagttgattgttgccatgaagagctatatgtatttttggactgtgtctatttacatattatataggcaaaacaaatatggccttgatttggcccctgggctatcattgcaaatttttatttaaacgaatatcagctttttttaagccagagaagagtctactgctttgcattctgtgctctttaaggtattcagtactgattttcacctagcatccaaatgtttaattgcattaattagtacaccagtttatactttattgtttgatacctgttgaaatggtatgcaaagtttcttaagactgtgtttaatgaacagctacaaaattaaacctgaagcaatgaatgacaattgacctttttttcccccactagcaggggcaataagttttaagctgagatgaatgatcagttgtgtaattttaaaccaagaaaagtaggaaaacacccttgtatattagaacgattttgatagtacaagtaacagaaaacacatgtcaacctgctctcaataaccaagtgatgtagggcagtcttgagacagagcttaatcagaactcatgccctttttcttttatttatcttggcttcactttgtaggttttgtcttcacactagcttccttgattgtctccaactgccacctgcagtaacattttacccttcacatgtagggggattaagacatagagctggtgagatacatcacttcccaccatcattggacttaacccttaagatctctccattaaaccactcttgcttttggcaaaggagaacgagagaatcctgattgtcttgggctggagccaggtgtgggatcaatccacgtggcttatatattcaaactacgtggctaaaacatatttggcaggatgggatagatatcagagtggcagctctaacaaaaatttactctctagcaaaagtttgttaaagatacactgtagcatatatttactaagttgcagttagtagtaaattcttttctccctttgaaataaaaccttgctaactatcacaattggcaagtagctcaatctgcgaactcaaacaaaaataattgagtgaacatttctcatctctgatgtagctttgctgatctatatcaaatgtattgtgatatttccagcagtaaattgatataattaagtatttgtttaatgaaagcaggaaacagcaaattgagagttacttatttcatccagatatcagtgatttggtgtttctttggaaaaacagtgtaaatattcacagctgtcttttgtttttcccatcacctccactgacatgattaaaagctaagacgcaattatgtgagtctaatgagttgtgtctaatcgatagtatcagtaatacagtattctgtcgttgaggcttgaaacaaatcatcatatcttaaactcaacaaggcccagatctagagagagccccaaactgagagaggagggtatgatctgcaaacaaatctgacagtcttggccaatctggtggggactctggaagcaagagtagctgttagagggcccctgcactgggcagaaatagcaacaaccttgtactccaactgtgcttagtcacagactagagggtgctcatgaggagggtggacttggcttagaggttgccaaggaagagtacagacttggtggctgtgatgtgctgcctcctgaaggggttgcagcgggggctgatgacggatgactggcctccacacagcctaacagtgagttcttttttgaagagcaatgcagtggtacactgcctgtgctgcctcaggccccaacatgctttggacccaatgcattctccagccccatcctacaccagtgtttctccttgttcttaaactatgccgcattttctcctccctcctactttaatgtgtttttatatatgttgccccctctgcttggaatcttatttttccttttctttgtctagaccatgcatgctagagggcttctttttctttttttttttttttcaggtctgatacatttatttatttttatatattttttatttcaatgggttttggggtacatgtggtttttggttacatggatgaattgtacattattgaagtccgagagttgagtgcacctgttaccccagtgtagtgtacattgtacccaataggtagtttttcatccctcaaccccctcccaccctctcctcttctgagtcttctgtgtccattgtatcactatgcctttgcacactcttaggttagctcccacttataagtgagaaaatgcagtatttggttttccatttctgagttacttcacttagaatagtgggcatggcagagtttgactggctgtccttaactatcactctaggttaggtttagttactctacatttccataccctcctttattttttctttagggtattctgaacaattttgatcattttactaattgtttctaattgtttgcctaaagtcattcttgccagcttgactgtacagcccatgaagctgagctcaggtttgcttgttcataacttgacagcagtattttgcataaaagaagtattccttgaaagtttggtacgttttatgcaccacaagaacacacaggagagtggaacataacacagttaggagaaggctttttagagaaggctgagacatagtaagcaaataggaggtagacagtgcattagtccattttgcattgctataaaggaatacctgaggctgggtaatttataaaggtaagagttgtatttggtgtatgcctatgctggctgtacgagcatggcatcagaatctatttggcttctcatgacccctcaggaagcttttactcatggcaaaaggtgaaggggcagcaggcctgtcacatggcaagaagggagcgagaaagatgacaggctcttcgtaagaaccagttctcttggcccagcatggtggctcacacctataatcccagcactttgggaggttgtggtgggcagatcacgaggtcaggagatcgagaccatcctggctaacatggtgaaaccccatctctactaaaaataaaaaaattagctggggtgatggcacacacctgtagtcccagctacttgggaggctgaggagggagaatcacttgaacccaggaggcagagtgccgggtccaacccgcagaccctgacccagcaacagatgaaagacatacactgacacaggtattttgcctgtcagtgggactaaggggctctgacgcctgagtctgcagctttcgcctccataaaatggcaaagtttgcgtttatttagtacaaattaaatgacaaagttctcaagtaaacaccactagagggtaatttacattgttgatctcctgagtagagagcagtcatgagcccacagatgatcaaaggttggtcttaggaccacatgagtaaaaaagctatttagataaactcctttacattcctatgtatctttgccctaagcttttaagagaattcagttgccttcagccaaatccttcactgaagctatgcaaacccactggccttccaagaaggtttgtgtctgtttcctataactttataatctcccaccaccctgaccgatatcctatagcggaggttgcagtgagctgagatcgcaccactgccctccagcctgggcaacagagcaagactccacctcagaaaaaaaaa

SEQ ID NO: 8437 - DNA, 582 bp, Homo sapiens
atatttgaggcaccatccctgccattgccgggcactcgcggcgctgctaacggcctggtcacatgctctccggagagctacgggagggcgctgggtaacctctatccgagccgcggccgcgaggaggagggaaaaggcgagcaaaaaggaagagtgggaggaggaggggaagcggcgaaggaggaagaggaggaggaggaagaggggagcacaaaggatccaggtctcccgacgggaggttaataccaagaaccatgtgtgccgagcggctgggccagttcatgaccctggctttggtgttggccacctttgacccggcgcgggggaccgacgccaccaacccacccgagggtccccaagacaggagctcccagcagaaaggccgcctgtccctgcagaatacagcggagatccagcactgtttggtcaacgctggcgatgtggggtgtggcgtgtttgaatgtttcgagaacaactcttgtgagattcggggcttacatgggatttgcatgacttttctgcacaacgctggaaaatttgatgcccaggtaaaaatccatccagagcatgaagaatgtttgg

SEQ ID NO: 8438 - DNA, 571 bp, Homo sapiens
agcgcggagcacctgcgcccgcggctgacaccttcgctcgcagtttgttcgcagtttactcgcacaccagtttcccccaccgcgctttggattagtgtgatctcagctcaaggcaaaggtgggatatcatggcatctatctgggttggacaccgaggaacagtaagagattatccagactttagcccatcagtggatgctgaagctattcagaaagcaatcagaggaattggaactgatgagaaaatgctcatcagcattctgactgagaggtcaaatgcacagcggcagctgattgttaaggaatatcaagcagcatatggaaaggagctgaaagatgacttgaagggtgatctctctggccactttgagcatctcatggtggccctagtgactccaccagcagtctttgatgcaaagcagctaaagaaatccatgaaggtatgagccccccacaagccatttctgcccagggtttgaccaagtcatcaaaaatagtgactttcttgcagtgcacacttgtgatgggtggacttggatgcccttttggtctggactctcccagtggtaga

SEQ ID NO: 8439 - DNA, 1811 bp, Homo sapiens
tttctcaattatttaaaaatataaaaatcatccttagcttgcaagccatacagaaacaggtggtgggctggatttggctcacaggctgaagtttgccagcccctgctttagaccatggtgagtatgttgggcttcacatcagttcagaaggcctgtttactgtgtgtataagaacgttttcccaaaaagccagtgcaggccctgaaagcattaaccaagcaggcaggctaacatgatgcatctccttgcaggatggtacccgagtcgtagggaaatgcggtggttactgtggaaaatgcactccatcctctggtactggcctggaggtgcgagttttatagctaaggtgctttgaagaggaagccattatggatggatgaaggatagtaatgcaatacctccaccttaatttgggtgcatgtgtatgtgtgtgtgtgtttgtgtgtgacttgtatgcttgtgtgtgtaaatgtgtgtacatatacatatatacatatctacacatacatatatacacatatatgtgtgtatgtagatatgtagactatcctaatgatgtaaagtttaatatttatgtttgaaattatttattgtgatgtaatatttttgtacgtaaaatgattctattatgactgcctttgcatgtagtaatatgacaaagtgatccttcattatcacggtacactattgtttacttttcatctgtaaatgttttattgttacttttttaaaatgaatttttttaaaacaatctagccatcatcaaggtgctataagagttgtataaaagatatttttggcatttctaggcaagtatcagccaataagtatgttagtgatatcacagattgtaccaactattaactatgttaaataagtattcagtttcatgtgatctctgggaaaaaaatatgctgccttggtgctaatattgtatgtatttaaatgatcatccgactcagaaatataaacacttttaatgaaagggaggaacggaaggacaatttccagtgcacagaatcacttggatgaaataagaccagctctttacccttatttttggatatgccttttttggaagagacttagactttatccttattgttgttagtgttgttaatattcgttgcttcagcccacggtgccttggtctctccacaatcaaatggaggatcccccaagcagcttcattacagagtgatattgggaaagtgagatcctctcaccattttgccaagatactctaaaatgacatccaagtttaccagtagaaagacacaggatgcacagaatgggcatgaccttcagctcacgagcacacctggagaaattcagaaccaggttctgaatcatcacgattgccttttgcatgaaaacatcggctggtgatgtgacttctcttcaggccatgagcctaacaccctgccggttttcatgcccgctgcagtaatggacgtttgtgtgaagaaatgaactgtggagtacaaaatgctttgagtctttccgattgctcattaattcacttttttgttacttctttccaaaatggaagtgctgaagccatggtctttctgcccctccaagctgatgaagggaagcctttgccaatggcccatggaagacacttggtttgagaaaccctgcccacttccaaagaccaaagagattaggaaaagcctggcagtattctccaactccaaacaagctctagagtgctccaggaaaagttatattcagtatatgaataagtgttattctccattattaatgtgttctgaaaatatattatgaataaatacatcaccacaccc

SEQ ID NO: 8440 - DNA, 2490 bp, Homo sapiens
gcaaccagcgggccgaggcggcggcgccagcggcgccttaaatagcatccagagccggcgcggggcagggagtgggctgcagtgacagccggcggcggagcggccggtccacggaggagaattcagcttagagaactatcaacacaggacaatgcaagcccatgagctgttccggtattttcgaatgccagagctggttgacttccgacagtacgtgcgtactcttccgaccaacacgcttatgggcttcggagcttttgcagcactcaccaccttctggtacgccacgagacccaaacccctgaagccgccatgcgacctctccatgcagtcagtggaagtggcgggtagtggtggtgcacgaagatccgcactacttgacagcgacgagcccttggtgtatttctatgatgatgtcacaacattatacgaaggtttccagaggggaatacaggtgtcaaataatggcccttgtttaggctctcggaaaccagaccaaccctatgaatggctttcatataaacagtgggtgattattgaacaaggatgctttgcttattcgatggtgatcgttccactttatgatacccttggaaatgaagccatcacgtacatagtcaacaaagctgaactctctctggtttttgttgacaagccagagaaggccaaactcttattagagggtgtagaaaataagttaataccaggccttaaaatcatagttgtcatggatgcctacggcagtgaactggtggaacgaggccagaggtgtggggtggaagtcaccagcatgaaggcgatggaggacctgggaagagccaacagacggaagcccaagcctccagcacctgaagatcttgcagtaatttgtttcacaagtggaactacaggcaaccccaaaggagcaatggtcactcaccgaaacatagtgagcgattgttcagcttttgtgaaagcaacagagaatacagtcaatccttgcccagatgatactttgatatctttcttgcctctcgcccatatgtttgagagagttgtagagtgtgtaatgctgtgtcatggagctaaaatcggatttttccaaggagatatcaggctgctcatggatgacctcaaggtgcttcaacccactgtcttccccgtggttccaagactgctgaaccggatgtttgaccgaattttcggacaagcaaacaccacgctgaagcgatggctcttggactttgcctccaagaggaaagaagcagagcttcgcagcggcatcatcagaaacaacagcctgtgggaccggctgatcttccacaaagtacagtcgagcctgggcggaagagtccggctgatggtgacaggagccgccccggtgtctgccactgtgctgacgttcctcagagcagccctgggctgtcagttttatgaaggatacggacagacagagtgcactgccgggtgctgcctgaccatgcctggagactggaccgcaggccatgttggggccccgatgccgtgcaatttgataaaacttgttgatgtggaagaaatgaattacatggctgccgagggcgagggcgaggtgtgtgtgaaagggccaaatgtatttcagggctacttgaaggacccagcgaaaacagcagaagctttggacaaagacggctggttacacacaggggacattggaaaatggttaccaaatggcaccttgaaaattatcgaccggaaaaagcacatatttaagctggcacaaggagaatacatagcccctgaaaagattgaaaatatctacatgcgaagtgagcctgttgctcaggtgtttgtccacggagaaagcctgcaggcatttctcattgcaattgtggtaccagatgttgagacattatgttcctgggcccaaaagagaggatttgaagggtcgtttgaggaactgtgcagaaataaggatgtcaaaaaagctatcctcgaagatatggtgagacttgggaaggattctggtctgaaaccatttgaacaggtcaaaggcatcacattgcaccctgaattattttctatcgacaatggccttctgactccaacaatgaaggcgaaaaggccagagctgcggaactatttcaggtcgcagatagatgacctctattccactatcaaggtttagtgtgaagaagaaagctcagaggaaatggcacagttccacaatctcttctcctgctgatggccttcatgttgttaattttgaatacagcaagtgtagggaaggaagcgttcgtgtttgacttgtccattcggggttcttctcataggaatgctagaggaaagagaacactgccttacagtcacctcatgttgcagaccatgtttatggtaatacacactttccaaaatgagccttaaaaattgtaaaggggatactataaatgtgctaagttatttgagacttcctcagtttaaaaagtgggttttaaatcttctgtctccctgtttctctaatcaaggggttag

SEQ ID NO: 8441 - DNA, 662 bp, Homo sapiens
gtcttactttgtcacccaggctggagtgcagtggaacgatctcggctcactgcaacctccgtctcccagtaaaccagtatttcacactgagattgtcggctgcgggtatattccaattccccgtctcctcatgaatatgaagtgaagggctctgaccctggaagtggttctaagcagggcaaaatggggtctcggaagtgtggaggctgcctaagttgtttgctgattccgcttgcactttggagtataatcgtgaacatattattgtatttcccgaatgggcaaacttcctatgcatccagcaataaactcaccaactacgtgtggtattttgaaggaatctgtttctcaggcatcatgatgcttatagtaacaacagttcttctggtactggagaataataacaactataaatgttgccagagtgaaaactgcagcaaaaaatatgtgacactgctgtcaattatcttttcttccctcggaattgctttttctggatactgcctggtcatctctgccttgggtcttgtccaagggccatattgccgcacccttgatggctgggagtatgcttttgaaggcactgctggacgtttccttacagattctagcatatggattcagtgcctggaacctgcacatgttgtggagtggaacatcat

SEQ ID NO: 8442 - DNA, 666 bp, Homo sapiens
gtgcagccaggggcttccggccgcggccctggcgcgtggtctgcgcgcgcccggccgtgcgtgcggatgcggggaggctgcgtgtgtgcgcagggagagaacgccggccaccttcccgcttccgagctgggtgcgcgccgagcacaggagattgcctgcgtttaggaggtggctgcgttgtgggaaaagctatcaaggaagaaattgccaaaccatgtctttttttctgttttcagagtagttcacaacagatctgagtgttttaattaagcatggaatacagaaaacaacaaaaaacttaagctttaatttcatctggaattccacagttttcttagctccctggacccggttgacctgttggctcttcccgctggctgctctatcacgtggtgctctccgactactcaccccgagtgtaaagtcttgctgctctgttgcccaggctggagtacagtggcaggatctcagctcactgcaatctccgtctctcaggtttaagcagttctcctgcctcagcctcccaagtaggtgggactacagaaccttcggctcgcgtgcttctgagctgctgtggatggcctcggctctctggactgtccttccgagtaggatgtcactgagatccctcaaatggagcctcctgctgctgtcactcctgagttt

SEQ ID NO: 8443 - DNA, 535 bp, Homo sapiens
actcacacacaatgtgccatcctgacaaggcttttacttctgataagctccaatgtgtgtttaatgaatacaaagccgcggtctgggtgccgcctcggccgcggccgctctcccgcgctcctttgccagaagctggcggagagaatttacatttaaagattagcagagtgagaaagagaaatctgccttttgttgtgtggggtgaggaggaggcatctacccctggccttgacgctatctcccatcacctctgctatccagacaggactcaccgagaaaagattgatctctgggctggtgaacataatctctgtcccagtcagaaaaggagagaggaaattagcagagcgattggtggagaatgatatctgtcaaaagaaacacttggagagcactgagtttagtaataggtgactgccggaaaaaagggaactttgaatattgtcaagataaaccccacttgaaaaactgaggtgcttaaggagtaaaataatatgttcctggtggcatcctccagatcgtactgagaagcact

SEQ ID NO: 8444 - DNA, 591 bp, Homo sapiens
agagaagagaaatgaactgtggcatcgctcctgccttctgaacagctctactccgattaaaaaaaaaaaatctcactgtgttctttgtaaaatggtactgcatagtgatgaatttcacccattcatcgaggcacttcttccacatgtccgtgcaattgcctatacttggttcaacctgcaggctcgaaaacgcaagtactttaaaaagcatgagaagcgaatgtcaaaggatgaagaaagagcagtcaaagatgagcttctcagtgaaaagcctgaaatcaaacagaagtgggcatccaggctccttgccaaactgcgcaaagatattcgccaggagtatcgagaggactttgtgctcaccgtgactggcaagaagcacccgtgctgtgtcttatccaatcccgaccagaagggtaagattaggagaatcgactgcctgcgacaggcagacaaagtctggcgtctggatctagtcatggtgatcctgttcaaaggcatccccttggaaagtaccgatggagagcggctcatgaaatccccacattgcacaaacccagcactttgtgtccagccacatcatatcacagtatc

SEQ ID NO: 8445 - DNA, 561 bp, Homo sapiens
acgtggaaaactgagtggacatggtgttcaggagattgaggctcagctaaattccagcttatttacctgcagttgcttacaaagtgtttggacataattgtgtaaagctagggttttttttctggtttttaaaacaggtaaaggatgtcacagcaccacttaataacatttcttctgaagtccagattttaacatctgatgccaataaattaactgctgagaacatcactagtgctacgcgagtggttggacagatattcaacacttccagaaatgcttcacctgaggcaaagaaagttgccatagtaacagtgagtcaactcctagatgccagtgaagatgcttttcaaagagttgctgctactgctaatgatgatgcccttacaacgtaagcacaaattcaatttggaaagaaaacttgactaagggctgtttactttcctaggctaaagtattaacagagatatctttatttctctcatggatgcagtaactgactgattcctctggaatgtagataagagctgtgactttccacttgacctttagttactagatgga

SEQ ID NO: 8446 - DNA, 794 bp, Homo sapiens
gcaaatgacaccgttttgtgctcaccagggcaaagcaagggagcgccctcacttcagcatctcagccctgctaaagaaaaagctgctgggtaacatcctttgtttttgcccagggaagctttagctgtgattcccttcagccggctcctgaatgtcaaagccagcacaggccagccagaagatgacactgagactacaggtttggaaggcggcgttgccatgccaggtgccgaagatgatgtggtgactccaggaaccagcgaagaccgctataagtctggcttgacaactctgagaaagtggatggagacacacagacaacagttgagaaagatggtttgtcaacagtgaccctggttggaatcatagttggggtcttactagccatcggcttcattggtgcaatcatcgttgtggttatgcgaaaaatgtcgggaaggccctaaagagctgaagggttacgccctgctgccaacgtgcttaaaaaaagaccgtttctgactctgtgccctgtccctgagctcgtgggagaagatgacccgtggaacacttgcctggcccactcagaatccacggtgacctctccgcttgccaaaataaccgaaggaaagaccgttcaccagacttggctcctctaaacatttgctgttcaaacatgtttttgaatatacattctataaaagattatttgaaagacaaaattcatagaaaatggagcaaaactgtataaactgatttgtaactaacactggaccattggatcgatattatatgctgtaaccatgtgtctccgt

SEQ ID NO: 8447 - DNA, 573 bp, Homo sapiens
aagtagaaaagaaacaaggctggatcactgttggggacttggaaggctgtatacattataaagttgttaaatatgaaaggatcaaatttttggtgattgccttaaagaatgctgtggaaatatatgcttgggctcctaaaccgtatcataaattcatggcatttaagatctccagcacaagcctctgctagttgatctcacggtagaagaaggtcaaagattaaaggttatttttggttcacacactggtttccatgtaattgatgttgattcaggaaactcttatgatatctacataccatctcatattcagggcaatatcactcctcatgctattgtcatcttgcctaaaacagatggaatggaaatgcttgtttgctatgaggatgagggggtgtatgtaaacacctatggccggataactaaggatgtggtgctccaatggggagaaatgcccacgtctgtgggtaggttaaccattccttatctccttcagcagttacaccccccaaatgaaacgaaaatcaagaaatgtgaaacaaccatttgattccacaaaaaaaaaaaaaaaaa

SEQ ID NO: 8448 - DNA, 1320 bp, Homo sapiens
ggagcttccacaaacttaaaaccatgaaacatctattattgctactattgtgtgtttttctagttaagtcccaaggtgtcaacgacaatgaggagggtttcttcagtgcccgtggtcatcgaccccttgacaagaagagagaagaggctcccagcctgaggcctgccccaccgcccatcagtggaggtggctatcgggctcgtccagccaaagcagctgccactcaaaagaaagtagaaagaaaagcccctgatgctggaggctgtcttcacgctgacccagacctgggggtgttgtgtcctacaggatgtcagttgcaagaggctttgctacaacaggaaaggccaatcagaaatagtgttgatgagttaaataacaatgtggaagctgtttcccagacctcctcttcttcctttcagtacatgtatttgctgaaagacctgtggcaaaagaggcagaagcaagtaaaagataatgaaaatgtagtcaatgagtactcctcagaactggaaaagcaccaattatatatagatgagactgtgaatagcaatatcccaactaaccttcgtgtgcttcgttcaatcctggaaaacctgagaagcaaaatacaaaagttagaatctgatgtctcagctcaaatggaatattgtcgcaccccatgcactgtcagttgcaatattcctgtggtgtctggcaaagaatgtgaggaaattatcaggaaaggaggtgaaacatctgaaatgtatctcattcaacctgacagttctgtcaaaccgtatagagtatactgtgacatgaatacagaaaatggaggatggacagtgattcagaaccgtcaagacggtagtgttgactttggcaggaaatgggatccatataaacagggatttggaaatgttgcaaccaacacagatgggaagaattactgtggcctaccaggttaacatcagatcccagaaaacagtgttctaaagaagacggtggtggatggtggtataatagatgtcatgcagccaatccaaacggcagatactactggggtggacagtacacctgggacatggcaaagcatggcacagatgatggtgtagtatggatgaattggaaggggtcatggtactcaatgaggaagatgagtatgaagatcaggcccttcttcccacagcaatagtccccaatacgtagatttttgctcttctgtatgtgacaacatttttgtacattatgttattggaattttctttcatacattatattcctctaaaactctcaagcagacgtgagtgtgactttttgaaaaaagtataggataaattacat

SEQ ID NO: 8449 - DNA, 502 bp, Homo sapiens
gatatgttctaaaaatgtttatgattgaatcttaaatggtaatatttgtagaaatatagttaatcattacaatgtctagcttatggatgtatagtcacaatatgagggtaaatcaaatgcatttgtattcccctgcttttagagccaattattaaaaaatacaccaaaatcattgatggagtgcctgtggaaataactgaaaaagagacacgagaagaacgaatcattacaggtcctgaaataaaatacactaggatttctactggaggtggagaaacagaagaaactctgaagaaattgttacaagaagacacacccgtgaggaagttgcaagccaacaaaaaagttcaaggatctagaagacgattaagggaaggtcgttctcagtgaaaatccaaaaaccagaaaaaaatgtttatacaaccctaagtcaataacctgaccttagaaaattgtgagagccaagttgacttcaggaactgaaacatcagcacaaagaagc

SEQ ID NO: 8450 - DNA, 7863 bp, Homo sapiens
gcctgtccaagctacagaacgcagaggctaaaatgggtgccagtgatgtcccgtgccttccagatatgaacaaaaggggaccatgagttggatcttctctcagggataaacttgcaccagccatgcttaagtgagctggtgcttaatcacttttccttcatggacagaggatctagactcattcttctgtgcttgtttgtgttattctttgacagcctgaaggtattgaaaaggaaaggacccagagtttccttatctgtacagaaggtgccaaagcctccaagcagggagttttggacttgccaaacgatgtagtagaagggtcagccagaggctttttcactgttgtgggggatattctaggacttgccttgcagaatctggttgttctccaaatgccctatggaagtggagagcagaatgctgccctactagcatctgatacttatgttctggactatctgaaatctactgagcaactgacagaggaagttcaatctaaggctttctttctcttatctaatggttatcaaaggcaattatctttcaaaaactctgatggttcctatagtgtgttttggcagcagagtcagaaaggaagcatatgactcagtgctcttacttttaagacattggagagaatgaaaaaatatgtattcattgatgaaaatgttcaaaaacagaccttaatctggctttcaagccaacagaaaacaagcggctgctttaagaatgatggccagcttttcaaccacgcctgggaggtgagagaggagaagcaccaggctttccttgttcctgggcattgcctgccttgccctgcctctggctttcctgatctggaatatgaatattcttcctgtgcatatgaaaccttctgaggcactgcagtcctgggcctgtggtgggttggtcagcagcaccattcctgctttgtgcatgtttaactacagcctggatgtgacttcttctgagtctcttgtctgccttattcagtctctagtccttcccgagtcagtcctcttcagaaattaaactagaaatagaagggaggggagagaaagggaacctagaaaagaaactttcataaatttggagacagtcaatgtataaagggagggggctgtgagtgtatgaggaaggaaagtttattcctgtccatgaatggcaagaaagttctggggagaatatctagtaattcatattgtttcaatgaagcaagtttttctaagaccctctcaaggaaaaattcaaaggccaagcttgccccggggccaaagtacaaatgaggtgaagtatatccttggcaaaatccaacccttttcctgtccatatttacgtaaatccctcccttccaacttcctttctttgcagatacctgtccatctccagcccattttctatctcctttcccctcctttttttccctgtggttgctcaaaatctcctatcatggcattttagcatgctctgatggcccctgaaataccctgagcttttcttcagcatccttcctcataatcatcactcctgttcttgaaacccagaatgcatatctaatccacacactctgatatttaatttgcatgcaaattgtattcaaattgctttgtggtatttttaatgtattccaaacttattccttacaacaggaggaccctgatggagatgagctcttactccttcatagaaaaatcaaaaactttcccacgttctcttctaaaacatcttcacatctttcttcttattggattcattactggtgaatcattgctgattactgctacagtttgtctgatcttacctagtattttctctataattaaatatctgtgtgggtgggtgtctgtgtgtgttttgagttgagagaaataaaaatgcaagggaaaaatcaaagcttacactgcagaggaatggtgatcctacttgctgtaatttagatgtactgacagtcctcgtacctcatgttagtgtctaccatatgctgttatttccatcttaaacacttggtttctcagaagtatttcttttctgaagaagacaggagttgtcctttgcttaaatagataaaatgggaagcttctacaagatcagtagatcccagatgccattctgaatgctatttgcatcagagtcactagagcacccattaaaatgcatttcgctgtcgtattcccaagttttttgaaccagaatctctgtgtagacactggttgatttaaataccccaggggacttttatgcacagtcagtttgcaaaccacatgatttataaatgagtttctcattttacactgtaagaatctgagacttgattctggtgatctcctagggtgcttttccaggaatttccaggaatcttcacggcaactttctgcttcacctcattagaaattctttgttggcttttttcagatttataccaagcggagacaaatagagtcctgtgaattccttagaatgcatgcttaacaccaggccacataaatacgattgaaattaattgttataacaacttaataattatgatttaattattgcatagagtctgaatgaattcttgcttagatagtatgattattaaccatctaatttaaaaactacacatgttcgggtgtttttatgaataatggtatttgttccagtatttttttcatacctagttttacttcaaaagaatacttgctattttgtgctctgctgtcccgaatgactcattgttcctttgttttcagggtggagatgaagaggacatttcactcactgcgtatgttgttgggatgttctttgaagctgggctcaatttcactgtatggattcccgtcatttctgatttcaggcagctgaatgcacattcaatagactgtagagtcagagtcacttgagattctaagactggatgaaaccccgagataacatttagtttattaccaccctttaaattcatgctgttcaaactgtttttcattcatagacagctttgaaaaacaggattgggtttctccctagggagaatacacatatgcacacaaaaaagagttattcacacaattgcaggcattcacatctctcctgaagttcagccatgaatttcagattaagaaccactgttctaagtaaagccgtggcctagtattctgtttctctctaaacaataagtgagtaaacattttcaacttaagtgtggctcaccctagccacctcccaatccatagattagatttccaaaatctattcctgaactaagatgctaggaattgtcagggtcattagtataccctgaaaattatcttcacaaatgtaagcctctattttaggcactagaaaaaaaaaaactcttaggcctatgataaatttggatgctttgccgcatagaagacattcataactaaaatatcactgatcaaatataaaaactgccattttcttactaaatttcattgggcctggcatggtggttcatgtttataatccaagcactttgggaggctgaggtgggtggattacctgaggtcaggagttcaagaccagcctggccaacatggtgaaaccctatctctactaaagatacaaaaattagctgggcttggtggtgcatgcctgtgatcccagctactcagaagatggaggcaggagaatcgcttgaacctgggaggtggaggttgcagtgagctgagatcatgccactgcactccagcctgggtaacagagcaagaccctatctcaaaaaaaaattattgcttaggtactaataatgacattataaatttattttaatgatatttttgaaggataaaatatatgtgtatatataaatggatttgtatgtaaaatatactttgaggatatattatatatattataaacaatgattagtttaaatgttcaacaagttcatggaatgttcgggtatcagtttacaatatatgattcttcttcctgaccaacagtttcctgctctacgaaacgcactcttttgccttgaagcggcattggacagtggtgtcactaatggctataatcatgcaattctagcttatgcttttgccttagctggaaaagagaagcaagtggaatctttactccaaaccctggatcaatctgccccaaaactaaataatgtcatctactgggaaagagaaaggaaacccaagacagaagaatttccatcctttattccctgggcaccttctgctcagactgagaagagttgctacgtgctgttggctgtcatttcccggaaaattcctgacctcacctatgctagtaagattgtgcagtggcttgcccaacggatgaattcccatggaggcttttcttccaaccaggctccggtagattgcaaacgacctgctttctttgtgatcccggctgcattcggacccctgtcagacagtaaatcccaagtaaggtacctgccatcggcagatctgagctttcttcttggacacctaaaacccacagtcctccacttgggtcctaagggtcttaggatccgcgatgggggtaataaccagcgggggaagaggggctggctctcagtccccgcctcgcggggggtgcctcccccctctgcgatgggggttccaagagccagggggggaagaggggctggctctcagtcactgcctcgtgggggatgcctccccccctgcgatgggggtcctaagagccaggggggtaagagggactggctctcagtccccgcctcgcgggggggtgcctcatccccctgcgatgggggtcctaagagccaggaggggaagagggggagaggatgatactaatttcagcatcgccggctgtgttcacccagcctgtgaaattattaatatcctgaaagggagagaatgatattactccccataatagacagatacgactccgcataatagagcacgaggtgtacacccaccctgtgatattcttcctcatattcagaagccaagaagttgatattactcgtaatatcgcaggacgtatacaccctcgtgttagatggtccttaataatattccagggcggagtgggtgatgtgactacatatatggcagaaagtggaaacccccctgagatattgttcccacggtcctggagggaagaaaatgatattactttcaatatgacagaaggtggacacgcccccactgatattgtttctaattgcaacgtgggagaggaggatatgacacgcgatatcgcagggagtagaaacacccctgtgatactgttcttaatattcagggaggaagaggatgatattactcccaatacagatgggtgtacgccctctgtacactgagggtgtacacccgtctgtgaaacagttcataatctccagaggtctccagagggggagatgatattactcacaatatggtaaacaggctgtgagtccaccgtggatcctaagagccagggggggaagaggggctggctctcagtcaccacagcatggggggcctttatgttcaggttttgcccaagagtcagcttatttgcttctagtactagcagggtagatgctgccaaggccctcaaacaggggggccatcccttagaaaccctgtctagttgtttagagacgtaggccaccggcctcagccaggtccccacagtttgggttaaaagtccagctgccatcttttctccctctgacacatacaatgggaaaggctttgtcagttcgggtagccccagggctggggctgccagaagtttttcctttaactcatgaaagccttgctgttgttggcatcccctttccaaagcttcccggtccctgccccttttgtgacctcatacaaaggcttggctaatactgcaaagtttggaatccacagtctccaaaaccccacagctcctaagaattctgtcacctgccttctgcccttaggctcccgtagattgcaaaggacatgctttctttgtgatcccgggctgcattcggacccctgtcggatagtgaattccaaataatgtacctaccgtcggcagatctgagctttcttcttggacacctaatacccacagtcctccagtgaaggatccagtgagattttccaggttaacggtcataaccgcctactggtccaacgttcagaagtaacacaggcacctggagaatacacagtagatgtggaaggacacggttgtacatttatccaggccacccttaagtacaatgttctcctacctaagaaggcatctggattttctctttccttggaaatagtaaagaactactcttcgactgcttttgacctcacagtgaccctcaaatacactggaattcgcaataaatccagtatggtggttatagatgtaaaaatgctatcaggatttactccaaccatgtcatccattgaagagcttgaaaacaagggccaagtgatgaagactgaagtcaagaatgaccatgttcttttctacttggaaaatggttttggtcgagcagacagtttccctttttctgttgagcagagcaaccttgtgttcaacattcagccagccccagccatggtctacgattattacgaaaaaggtaggcaagcaacagccatgccctaaggttattgaatgtgttatttatatataacattccctgagctactaaactttccaaaatcaacctccgtcttcacagagtaaacaatagatggcattactttgtatactggtttctttatcccatgatgtgtcttctgactgaacccattttccagttaccagagtttttcaacaccagaatccttgcaatataacctgacagggctccacttgaacttgaaatacaagccacactaagcttccaggtctttttgttattgtcattgttgttcatgctaagactgactgttccaagctactgctgtggactttgacttaaaaagaggagtggggaatattctgaaatgctaacttaaaaatttgatagattaatttctaaaacatatacaaagatgttgtagagaccacacaactgttccctggaaggttggtactatttatttcttgttgaatgctgtgtgaagtttgtggagtgtttgaattctgtctctatcaatcatttactaatagaatatatttcatcaagtgtcttaaatattattagcatatttctggatgtataaaatgggaaagtaattgtctctatttcaaaattattggaaggattagatctaatgtgcttatatcatctatttaataaaaatacatgttccctttattttttcagaagaatatgccctagctttttacaacatcgacagtagttcagtttcccagtgagacaaagcaattactggaagaggtgaagaaattttattacgtcataaaccattgaaaacacatctagtaagaaaatgaaaacctgaataagataggacagtagttgaagaaagaaaagtgtctggtacttcattagacttgtgtagctgtgtactgcatgagtaatctgataatcattaagattatattaatttctttaaaaatagctttaaagaattcacagctatatatgtaccttttataaatctctcatttttgttttgtaagttgacaggtcagtaaaaatttaggcatatatatttgtacatatgtgtgtgtatgtacatgtctatgtgcctatatatgcatgattttatatctaaatatctatttatatatacatacaaacgtgtttattgtttaaacgatgttttaaatcccaggtggaaaagcatttcttgtaacaaaccgattcttctgtatcaaacctggaaaaaaatcatgaaccatctgacatcgtgaacagtttgcagtgggctatggtttcttgtcaagtcttatttccttatcatcccattaaatgttgtcattttg

SEQ ID NO: 8451 - DNA, 2118 bp, Homo sapiens
ctaactctgcaacagttatatttagacaaggataatcttcaccggctgccatccatcgctacacaaacaggctttgaaacactcttgtagcctattttgtgttgtcttttgtaattgatgttttaatgagggttaggaaacttcagtgcaatatagaatgaagaacaatcattgtcattgtaataacaacagtaacacagccacagaaagtcaagtccccaccaagtgccgggctgctgcacttccaagcgctttacaaacatttttgggcttgtttttcacagcagcactgagaagtcaatccttctatgcctgttttacggataagactagtttggggctcaagctcaaagaaacccaccaaggcaggagcagagtagatcagggatttcatgatcctttaggccaatttggggtccctgtggccctccttggtttcactgcagatctccaaaccctggatgcctatgcatccacagctcagagaaattggcaggccccaaggtacagttcaccctttcccagcagctcagctcacccacagggccaaggaccccccaaaagaggacagtgggagtgaactgctgcaatagctcgtggcccaaaagccagattctccagcttggttcatagttacattataggccattttattcctttatagtaagtagatcttttcattttatcagccatttttggatcaacatacttgtgtgatgtagtcatttaacagactcagaattaaccgcttaccaggcctgacaatgctcagatcaggtagtcatggtcattttttaaaaaatggtttcaagtgttcctcaagaaaagtcaaaatggtttagaaatatttgaccagattatcccagtgctgagactgacagatgctcttgtaaacacccttcacccttctccaccgtctcgatataattaaataagttacagcaagtctcctttacttcccttgtgctccctttacagaatagaggtaattctccaaatacagaatgattttaaggattgtacaggagttcattccatctctaaagttaagcatccagaattatttcataattcattttcacagcatccctgtgttcagattgaaatatctcatttactccaggtcccacgaaccagagaacacccaggactcatctgaaggactctagtcaaccaatgcgtgtttacagttgctgagggggaaagaataagggtcaaattgctctatttaataaaatgtgtaatacagtgtcttccactgaaagggaactgaccctggcagtagctgatgaaaactggaatctgcattctgattccagatgtaaaaataatgtgagaaattaactttatatctaaaaaaaaagttaaactacttacccaaattacttgggaaatacaatattctgatgagaagagatgccattatacaccttatgaaaatttccagtgttgacagattgtcaacatctttacaggtaccacattaaaactatactgacggtggttttgtgtttctccttgttaatttgcagggcacttgtggatctatagacctcagggtcattgatatgtatggcttatggttgaaaattctctagaggaaagcatttagttacttggcttcggttcatttgagttacaaataagctagagtagacttctgtgtattcctttcttgatgagatgcaactttcaaccgagagggaaactggcactgatttctctgtggtaacccttgttctctgtgtcttttctggatacaacagttctgtggaagcaaatcattgaacgcaatggaggagtcctcaccagtgccttgaatgtcagctgcctggcgaaggtcactgacggcttcacccaaggacatatagtcgaagtggttaaaggcgtgctcacagatcagagaatccggcggcaaattcataaacctctcactgcagttgagtttattacggcgataaccagcatgaatccagtgtacaaagaggaagaagagagctttaagaactggtatgccaaaactcctctgggtaaaaaacgtgccttggcgataacaggaggcagcacagaaaaggcaaaggacaaagggaaaaggaaataaaagaaagagaaaaaggc

SEQ ID NO: 8452 - DNA, 1664 bp, Homo sapiens
gcagcaggaggaggcagagcacagcatcgtcgggaccagactcgtctcaggccagttgcagccttctcagccaaacgccgaccaaggaaaactcactaccatgagaattgcagtgatttgcttttgcctcctaggcatcacctgtgccataccagttaaacaggctgattctggaagttctgaggaaaagcagcactaaagatgtacctacccctccacaacagatgaaactgtgccagccaaacaacaaatgggcattgtccccagaagcttggacaaaaaggcacacagagttcaattccagttgaacagaataaaggccaaaatagagctgccttgggggtcactgcaattagactgcttaatgaagacattaaaagaactttacaacaaatacccagatgctgtggccacatggctaaaccctgacccatctcagaagcagaatctcctagccccacagaatgctgtgtcctctgaagaaaccaatgactttaaacaagagacccttccaagtaagtccaacgaaagccatgaccacatggatgatatggatgatgaagatgatgatgaccatgtggacagccaggactccattgactcgaacgactctgatgatgtagatgacactgatgattctcaccagtctgatgagtctcaccattctgatgaatctgatgaactggtcactgattttcccacggacctgccagcaaccgaagttttcactccagttgtccccacagtagacacatatgatggccgaggtgatagtgtggtttatggactgaggtcaaaatctaagaagtttcgcagacctgacatccagtaccctgatgctacagacgaggacatcacctcacacatggaaagcgaggagttgaatggtgcatacaaggccatccccgttgcccaggacctgaacgcgccttctgattgggacagccgtgggaaggacagttatgaaacgagtcagctggatgaccagagtgctgaaacccacagccacaagcagtccagattatataagcggaaagccaatgatgagagcaatgagcattccgatgtgattgatagtcaggaactttccaaagtcagccgtgaattccacagccatgaatttcacagccatgaagatatgctggttgtagaccccaaaagtaaggaagaagataaacacctgaaatttcgtatttctcatgaattagatagtgcatcttctgaggtcaattaaaaggagaaaaaatacaatttctcactttgcatttagtcaaaagaaaaaatgctttatagcaaaatgaaagagaacatgaaatgcttctttctcagtttattggttgaatgtgtatctatttgagtctggaaataactaatgtgtttgataattagtttagtttgtggcttcatggaaactccctgtaaactaaaagcttcagggttatgtctatgttcattctatagaagaaatgcaaactatcactgtattttaatatttgttattctctcatgaatagaaatttatgtagaagcaaacaaaatacttttacccacttaaaaagagaatataacattttatgtcactataatcttttgttttttaagttagtgtatattttgttgtgattatctttttgtggtgtgaataaatcttttatcttgaatgt

SEQ ID NO: 8453 - DNA, 754 bp, Homo sapiens
ggggcgggcgcgccgctgcatccccatcctcgtcgtcgcccggcacagcgcgagcgggcgagcggcgcgggcggccggagcgccgaggcccggccatggccaccaccagcaccacgggctccaccctgctgcagcccctcagcaacgccgtgcagctgcccatcgaccagttactgctttgtgtttgctctgggatacctcacagtgtgccaagttactcgagtctatatctttgactatggacaatattctgctgatttttcaggcccaatgatgatcattactcagaagatcactagtttggcttgcgaaattcatgatgggatgtttcggaaggatgaagaactgacttcctcacagagggatttagctgtaaggcgcatgccaagcttactggagtatttgagttacaactgtaacttcatggggatcctggcaggcccactttgctcttacaaagactacattactttcattgaaggcagatcataccatatcacacaatctggtgaaaatggaaaagaagagacacagtatgaaagaacagagccatctccaaatactgcggttgttcagaagctcttagtttgtgggctgtccttgttatttcacttgaccatctgtacaacattacctgtggagtacaacattgatgagcattttcaagctacagcttcgtggccaacaaagattatctatctgtatatctctcttttggctgccagacccaaatactattttgcatggacgctag

SEQ ID NO: 8454 - DNA, 4138 bp, Homo sapiens; identical to SEQ ID NO: 7984

SEQ ID NO: 8455 - DNA, 572 bp, Homo sapiens
gcttccgagctgggtgcgcgccgagcacaggagattgcctgcgtttaggaggtggctgcgttgtgggaaaagctatcaaggaagaaattgccaaaccatgtctttttttctgttttcagagactaaaatgttcgttcaaatgaatggccattggataactccagacctgaaaataaacactgttgtcaaaacagcatccaggccgggcgcggtggctcacgccagtaattccagcactttgggaggccgaggcgggcagatcacctcagtagttcacaacagatctgagtgttttaattaagcatggaatacagaaaacaacaaaaaacttaagctttaatttcatctggaattccacagagacaaggccactttatgtttcccaggctggactggaacccctgggctcaaatgatcctcctacctaagcctgcagagtagcgaggacttcagttttcttagctccctggacccggttgacctgttggctcttcccgctggctgctctatcacgtggtgctctccgactactcaccccgagtgtaaagtcttgctgctctgttgcccaggct

SEQ ID NO: 8456 - DNA, 1705 bp, Homo sapiens
ccacgggagactcggttttcctctctgtaaattacggatattaggaatacttgccgcctggggttgttttgagcactttcattgtttaggtgctgtatttattgggtgtgcgttccctgggagagcccgagggagacggctcctgcaccggccccaagggcctctctgcccgtggagtgcaggagcgaaggggctggcctagctgaccaccagggcccctgctggctctgaccgccctcctatcccaagtaattatttacacgtttcgcgttcgcttatgtattatgtgtaatcatggcacagtatcctgaagccgtcggagtctgtgtgctggtgcaaggtctgggacaaatttaagaagagagagctctccttcctccactaagagcggaaaatgaacaaatcccaggaacaagtgtcattcaaggatgtatgtgtggacttcactcaggaagagtggtatctgctggaccctgctcagaagattctatacagagatgtgatcctggaaaattatagcaatcttgtctcagtagggtattgcattactaaaccagaagtgatctttaagatcgagcaaggagaagagccctggatattagaaaaaggattcccaagccagtgccacccagaaaggaaatggaaagttgatgacgtgttagagagcagccaggaaaatgaagatgaccatttttgggagcttctattccacaacaacaaaacacattgagaactgatgtgccttcacaggaaacttggcccgtgtgtttccaggattcttgatgtttcttctgagctccagggtcaggcagtatgattgaagtttctaagccagcatccttggaataaagtagcttttgaggtaataaggagtagtccctaagaacccacgtggaaggtcacacttctgatctgagacctttcagcagagcctcagagcagagtggaaaaggccaggaaagagcatgtctggaactgcctgttcactgaagacattcttggcactcctgtacagttaaataacacttggtgatgtcagcacatgcagaaaccatggcagactgtccagtggatgggctttcaggaagaattaggctgccagcatgagcaaggggcaggcagcacaggagaggacacgtcactgcccactgtgaggactgtgaggacacagtctggggaaggcatcgcctagatggggaacttgtccctgtgctcctccataagcctgctcccttcctgtctactcactgtctttgcagcctgtggagatgcatcattgttcctattctgatgttacaaaaatcaagtgacagtgttgtataaaggtcaaaaaatgggcctagaaaatgtgacttatttaatcatttcatttgttagtggcatactcagaaaataactaattagggctgagctcggtggctcatgcctgtaatcccagcactctgggaggccgacatgggaggactgcttgaatccaggaattcaagaccagcttgggcaacatagtgagacccggtctctacaaaaaaaaagtatctggctgtggtggtgcgcacttgtagttctcctacttaagaggccgagactggaggattacttgagcttcagcccaggagttcaaggctgcagtgagctgtgaatcataccactgtggtacagcccaggcaacagagccagaccctgtctcaaaacaaaaaacaaaaaa

SEQ ID NO: 8457 - DNA, 579 bp, Homo sapiens
atgaagagactttacaaaaagtgttgttgagtgaatgaaaaattcacaaccacaaaatgcatatgttgcaagaaacgtaaaaaagaggtggagcccaacgtaagacgtgacttgcttattgcttacacggagttcacaattaactttgaaaaatttatctcggttgcaggtagcctctatctataaagacccaagtattggaaatttaattaatattgttattgtgaacttaattgtgattcataatgaacaggtaataaagtttttttcttttttcttctatctgtatccgaaatggcatatctaattgggatcggtacaacagattaaccataattcttctctgtatttaggatgggccttccatatcttttaatgctcagacaacattaaaaaacttttgccagtggcagcattcgaagaacagtccaggtggaatccatcatgatactgctgttctcttaacaagacaggatatctgcagagctcacgacaaatgtgataccttaggcctggctgaactgggaaccatttgtgatccctatagaagctgttctattagtgaagatagtggattga

SEQ ID NO: 8458 - DNA, 571 bp, Homo sapiens
agaaggaggtaagacccagcgcaagtggcttcctgccgtcgctgatggggacgagcgagcagagacttgctggaatgcccgggcctggtattcgagccagcacaggccagccagaagatgacactgagactacaggtttggaaggcggcgttgccatgccaggtgccgaagatgatgtggtgactccaggaaccagcgaagaccgctataagtctggcttgacaactctggtggcaacaagtgtcaacagtgtaacaggcattcgcatcgaggatctgccaacttcagaaagcacagtccacgcgcaagaacaaagtccaagcgccacagcctcaaacgtggccaccagtcactccacggagaaagtggatggagacacacagacaacagttgagaaagatggtttgtcaacagtgaccctggttggaatcatagttggggtcttactagccatcggcttcattggtgcaatcatcgttgtggttatgcgaaaaatgtcgggaaggtactcgccctaaagagctgaagggttacgccctgctgccaacgtgcttaaaaaaagaccgtttct

SEQ ID NO: 8459 - DNA, 800 bp, Homo sapiens
ggcatcctgtgagcagcaaacacatctgagcctggaaaagacgcagagaagtaaaagatcaaagtctgattggcaccggctcccattccggctccagcctccaatccgacccccatttcggctgcagcctcggacctagctccggccctcggtctatccggttgcatcctccctccctgttccggatcttatcttgcgccagcgcctactccaggatcccgtagccagacctcaagccatggctggtcccttctcccgtctgctgtccgcccgcccgggactcaggctcctggctttggccggagcggggtctctagccgctgggtttctgctccgaccggaacctgtacgagctgccagtgaacgacggaggctgtatcccccgaggcttttcccctcctccatccgtagtgttgtgtcatgggaggaaagaactgagcagatctgaagaaactgagctggccagccagaggcaactagaactattaggaaagcatagactctgaaagtccctaaagagattaccaaggtttaccctctttctaattccccctcctcccgcggagcaaagccagacatggccaactggacagctcccaggtaactgcactaggtctaggcgtctgtgccctccctccatggttactgggtaccccctccccagcgctgagtacccagacctccgaaagcacaacaactgcatggccagtcacctgaccccagcagtctatgcacggctctgcgacaagaccacacccactggttggacgctagatcagtgtatccagactggcgtggac

SEQ ID NO: 8460 - DNA, 541 bp, Homo sapiens
gcacctctatcttgctgagctccagccaaagaaggaagatttctttaaagactcgtgcagcacatcattatcgctggatgcccggacatgtaatacacctgacagcatgtgaagtgctcagaatggggcaggatgtcacctggaatcagcactaagtgattcagactttccttacttttaaatgggctgctgacaccagctaatggacattaaaacatgtcaggaggaacttaaattactaacgatttcaagaacaaggggtggtaattctggcacagtgtcagaaactcatcaactatagactgttcaatcattattgcctaggcgtccaactatggttttgcacctcaacataccaaagagtgctgctcttcatttcaagatgccgttgcagctctgataaatgcaaactgacaaccttcaaggccacgacggagggaaaatcattggtgcttggagcatagaagactgcccttcacaaaggaaatccctgattattgtttgaaatgctgaggacgttgctgcgaaggagacttttttc

SEQ ID NO: 8461 - DNA, 713 bp, Homo sapiens
gaacttatctacattcaagcaaaactagctcttttataagacatgtagttgctacccttttgggcctttatcttgcacttttttgctttggatggtatgccttacactttcttgtacaaagtggaatttcctactgtatcatgatcatcataggagtggagaacatgcacaattactgctttgtgtttgctctgggatacctcacagtgtgccaagttactcgagtctatatctttgactatggacaatattctgctgatttttcaggcccaatgatgatcattactcagaagatcactagtttggcttgcgaaattcatgatgggatgtttcggaaggatgaagaactgacttcctcacagagggatttagctgtaaggcgcatgccaagcttactggagtatttgagttacaactgtaacttcatggggatcctggcaggcccactttgctcttacaaagactacattactttcattgaaggcagatcataccatatcacacaatctggtgaaaatggaaaagaagagacacagtatgaaagaacagagccatctccaaatgtaaggtcatgagatttatctggagcctttacagcatgtattgactgcggttgttcagaagctcttagtttgtgggctgtccttgttatttcacttgaccatctgtacaacattacctgtggagtacaacattgatgagcattttcaagc

SEQ ID NO: 8462 - DNA, 4882 bp, Homo sapiens
ggaggtagatacctggaggtgccacatccaagctccagttctgtgtgcactggctttggccagggggacagccaggggttctcagccagggattctctcccctctggccggcctcagggccagcatctcacagcacacagcaccaggcgactgcctgctgccacacctgcctgatgggaggtttccttcacggttactttgcgattgggatgggtcagaatgtgtgtgctgggacaggacggtgggtcttgtctcaagctcagcagcggacacagcatgtgcctagaacagatggccacgtgggaggcctccaggctgctgttctgccctatatgaggtccctgggcctgcactctctgcactgatgaggtgtgccctgcaccaccctctggtgagcttccgggaggcccacatgctctcaatgcacaggaaaacagcagctacctttctgtgcgcttgcctggatccctgccaattcaaaggagtgacatcttacacggagttaggcttagagttggcaccagagatggaatcactgtgaagctaatgaagttaaacttccatcgtctttcactcactgacagaagcctcacaaggccctaactttgtatgtatcattttccattctttttggggcctccgaaactgtataaatttcaggttttagaaaacctgggtgtgtccctggttggcatataaagcggaatcacacatagtccccttgctccttgaaggttgctgaggaacggcacacattagagagtaaacaggcctttcagtgagttctctgcagtttgtccacagtgttgaaaaaagattacagctttcccagctgtgcacctgaggaagtacataggtgatttgcatttggggaccttgcaatatgagaaatgcatgtgtttaaacagtggattccattcagctcagccggaggccggctctgagatgctcactgagagacagttgggcctgagaaccatagggtggggttgagagcatggcagattcttgtttcccatctcatcttcagcctcacagcgcacatactgagtgcaagcagaaagaaatatctgtaccatttaaactgcctctacactccctcacctttctctctttgccagcacacagttaactgtgcatatgttatgttgatgctgctgttcttctgtgttatctcatttcttactcataacagctccctgcagaagcagtccttgtttctgataaggacaccaagccccaagggaattctgtagcacgccccactctacataggttgaaagacccggaatggctgtttgatcccatctccatgctctctgggactgcctcctgggcatgctctacaggacatcctggtccacacgccttctgtccttgccctccttgcccctccaggctccaccgctgaggctgcccgcatcatctaccccccagaggcccaaaccatcatcgtcaccaaaggccagagtctcattctggagtgtgtggccagtggaatcccacccccacgggtcacctgggccaaggatgggtccagtgtcaccggctacaacaagacgcgcttcctgctgagcaacctcctcatcgacaccaccagcgaggaggactcaggcacctaccgctgcatggccgacaatggggttgggcagcccggggcagcggtcatcctctacaatgtccaggtgtttgaaccccctgaggtcaccatggagctatcccagctggtcatcccctggggccagagtgccaagcttacctgtgaggtgcgtgggaaccccccgccctccgtgctgtggctgaggaatgctgtgcccctcatctccagccagcgcctccggctctcccgcagggccctgcgcgtgctcagcatggggcctgaggacgaaggcgtctaccagtgcatggccgagaacgaggttgggagcgcccatgccgtagtccagctgcggacctccaggccaagcataaccccaaggctatggcaggatgctgagctggctactggcacacctcctgtatcaccctccaaactcggcaaccctgagcagatgctgagggggcaaccggcgctccccagacccccaacgtcagtggggcctgcttccccgcagtgtccaggagagaaggggcagggggctcccgccgaggctcccatcatcctcagctcgccccgcacctccaagacagactcatatgaactggtgtggcggcctcggcatgagggcagtggccgggcgccaatcctctactatgtggtgaaacaccgcaagcaggtcacaaattcctctgacgattggaccatctctggcattccagccaaccagcaccgcctgaccctcaccagacttgaccccgggagcttgtatgaagtggagatggcagcttacaactgtgcgggagagggccagacagccatggtcaccttccgaactggacggcggcccaaacccgagatcatggccagcaaagagcagcagatccagagagacgaccctggagccagtccccagagcagcagccagccagaccacggccgcctctcccccccagaagctcccgacaggcccaccatctccacggcctccgagacctcagtgtacgtgacctggattccccgtgggaatggtgggttcccaatccagtccttccgtgtggagtacaagaagctaaagaaagtgggagactggattctggccaccagcgccatccccccatcgcggctgtccgtggagatcacgggcctagagaaaggcacctcctacaagtttcgagtccgggctctgaacatgctgggggagagcgagcccagcgccccctctcggccctacgtggtgtcgggctacagcggtcgcgtgtacgagaggcccgtggcaggtccttatatcaccttcacggatgcggtcaatgagaccaccatcatgctcaagtggatgtacatcccagcaagtaacaacaacaccccaatccatggcttttatatctattatcgacccacagacagtgacaatgatagtgactacaagaaggatatggtggaaggggacaagtactggcactccatcagccacctgcagccagagacctcctacgacattaagatgcagtgcttcaatgaaggaggggagagcgagttcagcaacgtgatgatctgtgagaccaaagctcggaagtcttctggccagcctggtcgactgccacccccaactctggccccaccacagccgccccttcctgaaaccatagagcggccggtgggcactggggccatggtggctcgctccagcgacctgccctatctgattgtcggggtcgtcctgggctccatcgttctcatcatcgtcaccttcatccccttctgcttgtggagggcctggtctaagcaaaaacatacaacagacctgggttttcctcgaagtgcccttccaccctcctgcccgtatactatggtgccattgggaggactcccaggccaccaggccagtggacagccctacctcagtggcatcagtggacgggcctgtgctaatgggatccacatgaataggggctgcccctcggctgcagtgggctacccgggcatgaagccccagcagcactgcccaggcgagcttcagcaggtagcgcattcttgggtgtgggcggcaggtatgggacacccaggagggagtggctgggctgccttggggggcctcctccctcctagggtctcaggctgggctgctgggccaggctttctttagtcaggagcagatgctcctgttgttgagtgaagactggaaagttacctggactccccggcgtggccgtctcattactcttccttttgagcagcagagtgacaccagcagcctgctgaggcagacccatcttggcaatggatatgacccccaaagtcaccagatcacgaggggtcccaagtctagcccggacgagggctctttcttatacacactgcccgacgactccactcaccagctgctgcagccccatcacgactgctgccaacgccaggagcagcctgctgctgtgggccagtcaggggtgaggagagcccccgacagtcctgtcctggaagcagtgtgggaccctccatttcactcagggcccccatgctgcttgggccttgtgccagttgaagaggtggacagtcctgactcctgccaagtgagtggaggagactggtgtccccagcaccccgtaggggcctacgtaggacaggaacctggaatgcagctctccccggggccactggtgcgtgtgtcttttgaaacaccacctctcacaatttaggcagaagctgatatcccagaaagactatatattgttttttttttaaaaaaaaaaagaagaaaaaagagacagagaaaattggtatttatttttctattatagccatatttatatatttatgcacttgtaaataaatgtatatgttttataattctggagagacataaggagtcctacccgttgaggttggagagggaaaataaagaagctgccacctaacaggagtcacccaggaaagcaccgcacaggctggcgcgggacagactcctaacctggggcctctgcagtggcaggcgaggctgcaggaggcccacagataagctggcaagaggaaggatcccaggcacatggttcatcacgagcatgagggaacagcaaggggcacggtatcacagcctggagacacccacacagatggctggatccggtgctacgggaaacattttcctaagatgcccatgagaacagaccaagatgtgtacagcactatgagcattaaaaaaccttccagaatcaataatccgtggcaacatatctctgtaaaaacaaacactgtaacttctaaataaatgtttagtcttccctgtaa

SEQ ID NO: 8463 - DNA, 544 bp, Homo sapiens
atcttcattgcaagtgtttaatcgggaagaagagagaagttgggaggtctctgaggaatatgtgtgtcttctgatcaaaatcatttccgaggagaaattgaggaaaccatcactgaaagctttggtaatgatcatagcaccttggatgggtattccagaagaaccaccttgtcttcaaaaatgtatcacaccaaaggacaagaaggttctgtttgtctccggtcatcagactgtgcctcaggattgtgttgtgctagacacttctggtccaagatctgtaaacctgtcctgaaagaaggtcaagtgtgtaccaagcataggagaaaaggctctcatggactagaaatattccagcgttgttactgtggagaaggtctgtcttgccggatacagaaagatcaccatcaagccagtaattcttctaggcttcacacttgtcagagacactaaaccagctatccaaatgcagtgaactccttttatataatagatgctatgaaaaccttttatgaccttcatcaactcaatcctaaggatatacaag

SEQ ID NO: 8464 - DNA, 678 bp, Homo sapiens
tccttaagagttgggagagtggacatatgggaagtactctcgtggagaattattcatgcctgctgttcagcttaccccatgctgcatcaaagacttggcgttattgagaattcagagtgaaaggagttggatgcttttctgggcttctgtttaactgctgaagagatcttttcccttcatggcttttcaaatgctacccaaataaccagctccaaattctctgtcatctgtccagcagtcttacagcaattgaactttcacccatgtgaggatcggcccaagcacaaaacaagaccaagtcattcagaagtttggggatatggattcctgtcagtgacgattattaatctggcatctctcctcggattgattttgactccactgataaagaaatcttatttcccaaagattttgaccttttttgtggggctggctattgggactcttttttcaaatgcaattttccaacttattccagaggcatttggatttgatcccaaagtcgacagttatgttgagaaggcagttgctgtgtttggtggattttacctacttttcttttttgaaagaatgctaaagatgttattaaagacatatggtcagaatggtcatacccactttggaaatgataactttggtcctcaagaaaaaactcatcaacctaaagcattacctgcc

SEQ ID NO: 8465 - DNA, 576 bp, Homo sapiens
gatttaaggatctctaggcagtgttgtcttaaacttttcttttttttttggaaacttttattttaatacagaatctaatctacagaaaagttgcaaagaacttctatatgccctttacccagactcaccagtcatttatgttttccctgttacttcctcatctcccctctctctgtcttttatacacagtgtgtacaatgtgtattcgcttttttagaacgaactttatccatagtagcagtgtacattcccactagcaacttaggagagtttcagttactctactccacatccttccaacagttgatatcaccagtgtaactgcataagtaatgttaatttaaagatacagcaaatgtttttgtttctttatttcagatgagaaataactttagacattatttcattgaaccttcccaactgaaattattttatgatgttataacatggatagtaactcaagtagcaataagttacacagttgtgccatttgtgcttctttctataaaaccatcactcacgttttacagctcctggtattattgcctgcacattcttggtatcttagtattattg

SEQ ID NO: 8466 - DNA, 821 bp, Homo sapiens
cgttggggccgcgtcccccacgcgcccccggagacgccctttccgtgtgcgcccgggacttggtgaaactttgcaggcgccggctgcgaaatggatttaatccgaggcgtcttgctccggctcctgctcctggcttccagcctcggacccggcgcggtgtcgctccgagcggccatccgaaaaccaggaaggtgttggaggatgactgtcacgaaaacttggacagaaccatgacgcaggaccaaagctgcaggaaacagaagatccaatccaggagagggatataagaagtccccagaataatagtgggaaggagatgctagaatgacaaatatttactagatagaaaaggcaaccagtccaactggaacaggcaaggtagggcctcctcttgacatcaagctgggcgcattgaactgtacggctttcagcatccagtggaaaatgccaaggcatcctggaagtcccatccttgggtacactgtcttttactctgaggttggcgcagataaatccctgcaggagcagttgcacagcgtgcctctcagccgggacatcccgaccacggaggaagtgattggagatttgaaaccaggcactgaatatcgtgtgagcatagcagcttacagccaggctggcaaagggcggctgagctctcctcggcatgtcaccactttgtcccaagattcctgcctgcctcctgcagctccccagcagccacatgtcattgtggtttcggattctgaggtggccctgtcttggaaacctggagcgagtgaaggaagcgcccctattcagtactattctgtggaattcatcag

SEQ ID NO: 8467 - DNA, 3640 bp, Homo sapiens
tatttctaattatttgcttatgctgggcactgaattttctcttaggctgaccatatattttattaaagtagtcttgaattcaggagtggaaaaaaaaaagttatgttttagacctcaatgtaagctgaaaggaaataaaggaacttctatatttccatttctcaggctgattttccttcccctgttctcttatctgtatcatgacatgagatgtgaacctcagaaatgtaaaaacaaaaagtctagaataaagcattccttgaattttaaatgaacatgcttttagcagctggatacgaagcagactattttcaacaaattgaatgtttcccacttgtgtgagagccaaacaagtgccatacagaaagggacctcttcaatgttaccaaagctttgtggcagcatttaagtgtggtggctccatagaagtcactatagcatggacgagccacttggcttgctttttcctgctaatcaaagttttaagaagataaaaagctatctttgttatatatgttttgtctaatttgcaatattacagtctcctggggggaaatccaacttccaataataattgtaaaaaaaaaaaaagaatgcactgtacttattcttttaatctgtctttctagaggccaatattttatttatcatgtgcatggtgatcatacttcaaggctggagcttttggagttgttgtgagtctgccctactttccaccaaaggcaccaattatacatgcacagtagttgcccttgtatcttttaaaaattgttcaagaggttgttctgtgtaagccaataactccacttgaaaatcacgaggaggtcatattttatttctgccagagagaacaggtatcattgtgccagcttggatcaaagcacctgatacaatctgtatttaaccttgtggaatgatggagggagagcttacaaacgaattcacaggaaatggctagagtttctgctgtaactctcaacctagccattcttctcatattatcctatggtagcttatctgaacctcagaaatctatccttttctaatttgaatcattttagtcaacgcagcctcagaaacggaaaccatctattgaaataatacacaaaagggacagccgtaatagcgtgtagccgttgaagcctccattccaatgaaaagacagtgggaatagatccctttggaaaccactaactaatcccagaaagaggaatgcctgtgaagttgagttgaacctgaagactagacacactgtagaacctccataggaagggtgcagagtaactgagttacttgtgatagggacaagacttacccactaccagaaacctgccccatcggtcacaaatgggattcccagagtggacactttctgtgtttagtgctgccatgggaatatcaaagaaggacactggcctttcttgagcacctatgtgtcagacactgtgcaagatgctttcaccattatgtcactatcctcccaacaccgagaggtatctttatccccactgggtgcacaggaagaggttaagtgattccctgaggcccacccagcaagtatgagagataggatctggcccttcattttctaactacaagttcaatgggctttctgctgaacacaccccacaccaccaccaccaccaccaccaccaccaccactaagccgtgtcatttctagggccatctcctctcagtcttacagccagcttgggtgtcccacctccaggcctctgcgcaaagggaatgtgggtctctctggtgatgttttcctaactgtatttgtgatgaaaacagggcattccagttccctcttgcccagcacaaccacatcagattcgacggctcaagaggggtatgagtctaggggaggaatgctggactggaagcatctgcttgactcacctgacagcacagaccctttgggggcagtgtcttcccataatcaccaagacaagaagggagtgattcgggaaagttacctcaaaggccacgaccagctggttcccgtcaccctcttggccattgcagtcatcctggctttcgtcatgggggccgtcttctcgggcatcaccgtctactgcgtctgtgatcatcggcgcaaagacgtggctgtggtgcagcgcaaggagaaggagctcacccactcgcgccggggctccatgagcagcgtcaccaagctcagcggcctctttggggacactcaatccaaagacccaaagccggaggccatcctcacgccactcatgcacaacggcaagctcgccactcccggcaacacggccaagatgctcattaaagcagaccagcaccacctggacctgacggccctccccaccccagagtcaaccccaacgctgcagcagaagcggaagcccagccgcggcagccgcgagtgggagaggaaccagaacctcatcaatgcctgcacaaaggacatgccccccatgggctcccctgtgattcccacggacctgcccctgcgggcctcccccagccacatccccagcgtggtggtcctgcccatcacgcagcagggctaccagcatgagtacgtggaccagcccaaaatgagcgaggtggcccagatggcgctggaggaccaggccgccacactggagtataagaccatcaaggaacatctcagcagcaagagtcccaaccatggggtgaaccttgtggagaacctggacagcctgccccccaaagttccacagcgggaggcctccctgggtcccccgggagcctccctgtctcagaccggtctaagcaagcggctggaaatgcaccactcctcttcctacggggttgactataagaggagctaccccacgaactcgctcacgagaagccaccaggccaccactctcaaaagaaacaacactaactcctccaattcctctcacctctccagaaaccagagctttggcaggggagacaacccgccgcccgccccgcagagggtggactccatccaggtgcacagctcccagccatctggccaggccgtgactgtctcgaggcagcccagcctcaacgcctacaactcactgacaaggtcggggctgaagcgtacgccctcgctaaagccggacgtaccccccaaaccatcctttgctcccctttccacatccatgaagcccaatgatgcgtgtacataatcccagggggagggggtcaggtgtcgaaccagcaggcaaggcgaggtgcccgctcagctcagcaaggttctcaactgcctcgagtacccaccagaccaagaaggcctgcggcagagccgaggacgctgggtcctcctctctgggacacaggggtactcacgaaaactgggccgcgtggtttggtgaaggtttgcaacggcggggactcaccttcattctcttccttcactttcccccacaccctacaacaggtcggacccacaaaagacttcagttatcatcacaaacatgagccaaaagcacatacctaccccatcccccacccccacacacacacacacacacacatgcacacaacacatacacacacacgcacagaggtgaacagaaactgaaacattttgtccacaacttcacgggacgtggccagactgggtttgcgttccaacctgcaaaacacaaatacattttttaaaatc

SEQ ID NO: 8468 - DNA, 969 bp, Homo sapiens
gctctgcagcccacctgggcagagcctgaaaaaccctgtgggatcacggatttagagtggggaaggatgtcagctcacattttactttgcagatgagtatattaagttcagagatgataatgtgcccaaggtgcccagcagggcacagattcatttcctacttcattctactgagccctgtgcctttccagtcctggtctgcccctctatactctacacagcagcgtgaatgataaagggctgagagtcctggaagacaattcagctttggataaaatgctgcagaatgtccagatgccctccaaaaaactggacttcattattttgaatgaaacaaaattttggtatcagatgatcttgcctcctcattttgataaatccaagaaatatcctctactattagatgtgtatgcaggcccatgtagtcaaaaagcagacactgtcttcagactgaactgggccacttaccttgcaagcacagaaaacattatagtagctagctttgatggcagaggaagtggttaccaaggagataagatcatgcatgcaatcaacagaagactgggaacatttgaagttgaagatcaaattgaagcagccagacaattttcaaaaatgggatttgtggacaacaaacgaattgcaatttggggctggtcatatggagggtacgtaacctcaatggtcctgggatcgggaagtggcgtgttcaagtgtggaatagccgtggcgcctgtatcccggtgggagtactatgactcagtgtacacagaacgttacatgggtctcccaactccagaagacaaccttgaccattacagaaattcaacagtcatgagcagagctgaaaattttaaacaagttgagtacctccttattcatggaacagcagatgataacgttcactttcagcagtcagctcagatctccaaagccctggtcgatgttggagtggatttccaggcaatg

SEQ ID NO: 8469 - DNA, 795 bp, Homo sapiens
ggatccttccagctgaacaaagtcagccacaaagcagactagccagccggctacaattggagtcagagtcccaaagacatgggcttgttagagtgctgtgcaagatgtctggtaggggccccctttgcttccctggtggccactggattgtgtttctttggggtggcactgttctgtggctgtggacatgaagccctcactggcacagaaaagctaattgagacctatttctccaaaaactaccaagactatgagtatctcatcaatgtgatccatgccttccagtatgtcatctatggaactgcctctttcttcttcctttatggggccctcctgctggctgagggcttctacaccaccggcgcagtcaggcagatctttggcgactacaagaccaccatctgcggcaagggcctgagcgcaacggtaacagggggccagaaggggaggggttccagaggccaacatcaagctcattctttggagcgggtgtgtcattgtttgggaaaatggctaggacatcccgacaaggtgatcatcctcaggattttgtggcaataacaaggggtgggggaaaattgggcgcgagtctgtggcctcgtccccacccaaggctgggtcctctctaggggcctggcatttgagtgaggaagcgatggctgcagccgaacgagaaggtcaggaagaacgtggtgcccagctggcttagcctcacctttcaaaggttccctaagcaaatttcttctcaaaacagaaagcatgagttttgtgggatgctttgtacaatcagaccat

SEQ ID NO: 8470 - DNA, 1788 bp, Homo sapiens
ggctggctttcggtttctctgctcacctccggataaatcacggggtctcccgcgccgctcatggcgcctcccgtccgtctcgagcgtccctttccttcccggcgctttcctgggttgcttctggcggccctggtgttgctgctgtcctccttctccgatcaatgcaatgtcccggaatggcttccatttgccaggcctaccaacctaactgatgactttgagtttcccattgggacatatctgaactatgaatgccgccctggttattccggaagaccgttttctatcatctgcctaaaaaactcagtctggacaagtgctaaggacaagtgcaaacgtaaatcatgtcgtaatcctccagatcctgtgaatggcatggcacatgtgatcaaagacatccagttcagatcccaaattaaatattcttgtcctaaaggataccgactcattggttcctcgtctgccacatgcatcatctcaggcaacactgtcatttgggataataaaacacctgtttgtgacagaattatttgtgggctaccccccaccatcgccaatggagatttcactagcatcagcagagagtattttcactatggatcagtggtgacctaccactgcaatcttggaagcagagggaaaaaggtgtttgagcttgtgggtgagccctccatatactgcaccagcaaagatgatcaagtgggcatctggagtggcccagcccctcagtgcattatacctaacaaatgcacgcctccaaatgtggaaaatggaatattggtatctgacaacagaagcttattttccttaaatgaagttgtggagtttaggtgtcagcctggctttggcatgaaagggccctcccatgtgaagtgccaggccctgaacaaatgggagccagagttaccaagctgctccagggtatgtcagccacctccagatgtcctgcatgctgagcgtacccaaagggacaaggacaacttttcacccgggcaggaagtgttctacagctgtgagcccggctacgacctcagaggatctacgtatttgcactgcacaccccagggagactggagccctgcagcccccagatgtgaagtgaaatcctgtgatgacttcctgggccaacttcctaatggccatgtgctatttccacttaatctccagcttggagcaaaagtggattttgtttgtgatgaaggatttcaattaaaaggcagctctgctagttactgtgttttggctggaatggaaagcctttggaatagcagtgttccagtgtgtgaacgtaaatcatgtgaaactcctccagttccagtgaatggcatggtgcatgtgatcacagacatccatgttggatccagaatcaactattcttgtactacagggcaccgactcattggtcactcatctgctgaatgtatcctctcgggcaatactgcccattggagcatgaagccaccaatttgtcaacaaatcttttgtccaaatcctccagctatccttaatgggagacacacaggaactccccttggagatattccctatggaaaagaagtatcttacacatgtgacccccacccagacagagggatgaccttcaacctcattggggagagcaccatccgccgcacaagtgaacctcatgggaatggggtttggagcagccctgcccctcgctgtgaacttcctgttggtgctggttcacatgatgctcttatagttggtaagttttatgaagtgtttgctgaggaattctgtcatctttaacagtaagtacctacttat

SEQ ID NO: 8471 - DNA, 608 bp, Homo sapiens
aagtcactccaagggcagatcaccagggaggagagggagttggccaggcaggcattgtgcaatgaccaatctctcacactgtgccgactgcatattccaggaaagcaaaggctacgagtttgagtcagaaacagatacagagaccatcgccaagctgattaaatatgtgttcgacaacagagaaactgaggacattacgttttcaacgttggtcgagagagtcattcagcagttggaaggtgcattcgcgctggttttcaagagtgtccactacccaggagaagccgttgccacacggagaggcagccccctgctcatcggagtccggagcaaatacaagctctccacagaacagatccctatcttatacaggacgtgcactctggagaatgtgaagaatatctgtaagacacggatgaagaggctggacagctccgcctgcctgcatgctgtgggcgacaaggccgtggaattcttctttgcttctgatgcaagcgctatcatagagcacaccaaccgggtcatcttcctggaggacgatgacatcgccgcagtggctgatgggaaactctccattcaccgggtcaagcgctcggccagtgatgacc

SEQ ID NO: 8472 - DNA, 538 bp, Homo sapiens
gtgcctgctctcctaggagccctgcctgctgcctacacccaccacagccactcgttttggcacatctgatgtttggaaatatcttgggatggagacagttttgtagaagtcatggctgcgccgcatctcaagggcaagctctgtggtctttgtggcaactacaatggacataaacgtgatgacttaattggtggagatggaaacttcaagtttgatgtggatgactttgctgaatcttggagggtggagtccaatgagttctgcaacagacctcagagaaagccagtgcctgaactgtgtcaagggacagtcaaggtaaagctccgggcccatcgagaatgccaaaagctcaaatcctgggagtttcagacctgccactcgactgtggactacgccactttctaccggtcctgtgtgacagacatgtgtgaatgtccagtccataaaaactgttattgcgagtcatttttggcatatacccgggcctgccagagagagggcatcaaagtccactgggagcctcagcagaattgtgcag

SEQ ID NO: 8473 - DNA, 583 bp, Homo sapiens
acagttctctgtgttctgtctccttgcagtttctggagaatcctttgtctatagtccagatctcctttcatggctatctaatggatctgtcttctgcagcgtttccatccaggtgttggcatcctttcacagtaagcagtaggagaggcttgctgccgaggctcatatatgtcacaaacaagactacctgatcttcattgagagtcactctgatgaggacattacatgttaccatatctaatcagtagccacttgagctatcggcaggaccctcatcccccgttactttagcactgtgtttgaaggaggggtgaccgacctgtattacattctcaaacactcgaaagagtcataccacaactcatccatcacggtggactgcgaccagtgtaccatggtcacccagcacgggaagcccatgtttaccaaggtatgtacagaaggcagactgatcttggagttcacctttgatgatctcatgagaatcaaaacatggcactttaccattagacaataccgagagttagtcccgagaagcatcctagccatgcatgcacaagatcctcaggtcctggatcagctg

SEQ ID NO: 8474 - DNA, 1735 bp, Homo sapiens
tgaaataaatgtcctattccggtaaatttaaaggactgttttaacatgataatttgtctcctaaaataatgtcccaggacccacactaacaaaagtcaaaattgaaggtgaacctgaattcagactgattaaagaaggtgaaacaataactgaagtgatccatggaggtgcgttccttatgttacctggggccgactaccttcgctgtgattattttgaaatagtgttggtttagaaatattgaacatctgatattttctcttagttcttattttataaaaattgtgggaattatttcctcagctatgagttcttattagctggtcagaaataaaacatagttagcttttaatggatctagttggaattaatttatctattaagtcactgggcccaacaaaatgtcatgatttttgcatatacaagtgaggattgtggaataaaattgtaacattaatgtcagtataaaaggaaatattagaaacagtaggaaaaaatgaccattgtataagtctctgtctaataagccactccactactaggatttatgatagggctcccattccaatgatatagaactccctggattctcactaagtatttattccacatccagaaaacaagtatgacatggagagttaggatgtcaaatggccctctctctcaaccaagattcaggacatagctattaccttttagatccctattgatatgatttttgggggatatgttctaaaaatgtttatgattgaatcttaaatggtaatatttgtagaaatatagttaatcattacaatgtctagcttatggatgtatagtcacaatatgagggtaaatcaaatgcatttgtattcccctgcttttagagccaattattaaaaaatacaccaaaatcattgatggagtgcctgtggaaataactgaaaaagagacacgagaagaacgaatcattacaggtcctgaaataaaatacactaggatttctactggaggtggagaaacagaagaaactctgaagaaattgttacaagaagaggtcaccaaggtcaccaaattcattgaaggtggtgatggtcatttatttgaagatgaagaaattaaaagactgcttcagggaggttagtaaaaggacaacaactaacccccttaacaggttctagtgactgagttcaactttttaaagactgagcaagcagattttttcttttaattgggttaaaaaaaaaaaagacaacatccactgttgtcttaatagatggattggttcaatggtagttaatagttatgaagaaatgattactagtttaaacagtctttaaaaagttctatggtataaagtttggggagcaatgaatattttttttgctttgattcagataattttaagggccttttaagtatgcaaaagggaaataattgttaaattgctagctgttaaacaagcccaaatttgatatactttttatatttaaaaaattatattcactgcccccataagagcaatcaaggcatgtctttaaattctatacatagatatagccaaaaatagtgcatttagtaacattcttttccaaaactatattcttgggaatgaatatctgtttcttctaacagtttgagtgataatctatacctgtagatataagttattttgcatataaaattaatcttaatcttttatggaatgttctctgtctgtggcattaaatgaaccttaagaacaaaaaaaaaagaa

SEQ ID NO: 8475 - DNA, 696 bp, Homo sapiens
acaattactctacagctcagaacaccaactgctgaggctgccttgggaagaggatgatcctaaacaaagctctgctgctgggggccctcgctctgaccaccgtgatgagcccctgtggaggtgaagacattgtggctgaccacgttgcctcttgtggtgtaaacttgtaccagttttacggtccctctggccagtacacccatgaatttgatggagatgagcagttctacgtggacctggagaggaaggagactgcctggcggtggcctgagttcagcaaatttggaggttttgacccgcagggtgcactgagaaacatggctgtggcaaaacacaacttgaacatcatgattaaacgctacaactctaccgctgctaccaatgaggttcctgaggtcacagtgttttccaagtctcccgtgacactgggtcagcccaacaccctcatttgtcttgtggacaacatctttcctcctgtggtcaacatcacatggctgagcaatgggcagtcagtcacagaaggtgtttctgagaccagcttcctctccaagagtgatcattccttcttcaagatcagttacctcaccttcctcccttctgctgatgagatttatgactgcaaggtggagcactggggcctggaccagcctcttctgaaacactggggtgcatcgccatctacaggagcagaagaat

SEQ ID NO: 8476 - DNA, 4427 bp, Homo sapiens
atgacgggttcccatttgtcccatgactcatggcagtatgttctgctgattccttctgttctacaagaaggctctttggataaagcttgtgcccagctttttaatctcactgaatctgttgttttgacggtctccctcaactatggtgaggtccagaccaaaatatttgaagaaaatgttactggagaaaatttcttcaaatgcatcagctttgaggttcctcaggccagatctgacccactggcatttattacattttctgctaaaggagccactctcaacctggaagagaggagatctgtggcaatcagatccagagagaatgtggtctttgtacagactgataaacccacctacaagcctggacagaaagatgtaaatggcatcgctcagtttttcttggacacatatacgtttacatacccaaatatcactttgaaagatcctcaaaacaatcggatttttcaatggcaaaatgtgacttctttccgaaatattacccaactctcgttccaactgatttcagaaccaatgtttggagattactggattgttgtgaaaagaaactcaaggaagacagtgacacaccaatttgctgttaaaagatatgtgctgcccaagtttgaagttacggtcaatgcaccacaaacagtaactatttcagatgatgaattccaagtggatgtatgtgctaagtacacctttggccaacctgtgcaagggaaaacccaaatccgggtgtgcagagagtatttttcttcaagcaattgtgagaaaaatgacaatgaaatatgtgagcaatttattgcacagttggaaaatggttgtgtttctcaaattgtaaatacaaaagtcttccaactctaccgttcgggattgttcatgacatttcatgtcgctgtaattgttacagaatttgggacaggaaattactgtatgcagatcagtgagaagacctcagtttttatcactcaattgcttggaactgtaaactttgagaacatggatactttctacagaagagggatttcttattttggaactcttaaattttcggatcccaataatgtacctatggtgaacaagttgttgcaactggagctcaatgatgaatttataggaaattatactacggacgagaatggcgaagctcaattttccattgacacttcagacatatttgatccagagttcaacctaaaagccacatatgttcgacctaagagctgctatcttcccagctggttgacgcctcagtacttggatgctcacttcttagtctcacgcttttactcccgaacgaacagcttcctgaagattgttccagaaccaaagcagcttgaatgtaatcaccagaaggttgttactgtgcattactccctaaacagtgaagcatatgaggatgattccaatgtaaagttcttctatttggtaagtctcagtcatgattcaggaaactttcagcatcgtatctcttcgtctcctatttacacagcctggaatggaaacttctcgttcccactcagcatcagtgctgatctggctcctgcagccgtcctgtttgtctacacccttcaccccagtggggaaattgtggctgacagtgtcagattccaggttgacaagtgctttaaacacaaggttaacataaagttctctaacgagcagggcttacctggttccaatgctagtctctatcttcaagcggcgcctgtcttattctgtgccctcggggctgtggatgggaacgtccttctactgaaatctgaacaacagctgtcagctgaaagtgtgtataacatggttccaagtatagagccgtatggttatttctaccatggcctcaatcttgatgatggcaaggaagacccttgcattcctcagagggatatgttctacaatggtttatattacacacctgtaagcaactatggggatggagatatctataatattgtcaggaacatgggtctcaaagtctttaccaatctccattaccgaaaaccagaagtatgtgtgatggagagaaggctgccactccctaagccgctttatctagaaacagaaaattatggtccaatgcatagtgttccgtctagaattgcatgtagaggggagaatgctgactatgtagaacaggctataattcaaacagtaagaacaaacttcccagagacatggatgtgggacctcgtcagtgtcgattcctcaggctctgccaatctttcgttcctcattcctgatacgataacccaatgggaggcaagtggcttttgtgtgaatggcgacgttggatttggcatttcctctacaaccactctagaagtctcccaacctttctttattgaaattgcctcacccttttcggttgttcaaaatgaacaatttgatttgattgtcaatgccttcagctacctgaatacatgtgtagagatttctgttcaagtggaggagtctcagaattatgaagcaaatattaatacctggaaaatcaatggcagtgaggttattcaagctggagggaggaaaacaaacatctggactattatacctaagaaattgggtaaagtgaatatcactgtagttgctgagtccaaacaaagcagtgcttgcccaaatgaaggaatggagcagcaaaagctaaactggaaagacactgtggtcaaaagcttcttagtagagcctgaaggtattgaaaaggaaaggacccagagtttccttatctgtacagaaggtgccaaagcctccaagcagggagttttggacttgccaaatgatgtagtagaagggtcagccagaggctttttcactgttgtgggggatattctaggacttgccatgcagaatctggttgttctccaaatgccctatggaggtggagagcagaatgctgccctactagcatctgatacttatgttctggactatctgaaatctactgagcaactgacagaggaagttcaatctaaggctttctttctcttatctaatggttatcaaaggcaattatctttcaaaaactctgatggttcctatagtgtgttttggcagcagaatcagaaaggaagcatatggctcagtgctcttacttttaagacattggagagaatgaaaaaatttgtattcattgatgaaaatgttcaaaaacagaccttaatctggctttcaagccaacagaaaacaagcggctgctttaagaatgatggccagcttttcaaccacgcctgggagggtggagatgaagaggacatttcactcactgcatatgttgttgggatgttctttgaagctgggctcaattccacttttcctgctctacgaaacgcactcttttgccttgaagcggcattggacagtggtgtcactaatggctacaatcatgcaattctagcttatgcttttgccttagctggaaaagagaagcaagtggaatctttactccaaaccctggatcaatctgccacaaaactaaataatgtcatctactgggaaagagaaaggaaacccaagacagaagaatttccatcctttattccctgggcaccttctgctcagactgagaagagttgctatgtgctgttggctgtcatttcccggaaaattcctgacctcacctatgctagtaagattgtgcagtggcttgcccaacagatgaattcccatggaggcttttcttccaaccaggtgattaatgtaggcctgatattaatagcaatatgcggggaagaggggctcttctctaagaatcaaaacactgtcacctttagcagtgaaggatccagtgagatccagtttaacggtcataaccgcctactggtccaacgttcagaagtaacacaggcacctggacaatacacagtagatgtggaaggacgcggttgtacatttatccaggccacccttaagtacaatgttctcctacctaagaaggcatctggattttctctttccttggaaatagtaaagaactactctttgactgtttttgacctcacagtgaacctcaaatacactggaattcgcaataaatccagtatggtggttatagatgtaaaaatgctatcaggatttactccaaccatgtcatccattgaagagcttgaaaacaagggccaagtgatgaagactgaagtcaagaatgaccatgttcttttctacttggaaaatgtttttggtcgagcagacagtttcactttttctgctgagcagagcaaccttgtgttcaacattcagccagccccaggcatggtctacgattattattggaagggtggagaagcatttcttttaacaaactgattcttctgtatcaaacctggaaaaaaatcatgaaccatctgacatcgtgaacagtctgcagtgggctatggtttcttgacaagtcttatttccttatcatcccattaaatgttgtcattttgcatctg

SEQ ID NO: 8477 - DNA, 4816 bp, Homo sapiens
tcttggaatacagaagagaaactagaaatatacgtattttgtttcacatttgaacagtcattcttgaggaatactccatacctgagtagacagccatgtggccatcgcagctactaattttcatgatgctcttagctccaataattcatgctttcagccgtgccccaattccaatggctgtggtccgcagagagctatcctgtgagagctatcctatagagcttcgctgtccaggaacagacgtcatcatgatagaaagtgccaactatggcaggactgatgacaaaatttgtgactctgaccctgctcagatggagaatatccgatgttatctgccagatgcctataagattatgtctcaaagatgcaataacagaacccagtgtgcagtggtggcaggtcctgatgtttttccagacccgtgtccaggaacctataaataccttgaagtgcagtatgaatgtgtcccttacaaagtggaacaaaaagtttttctttgtcctggactactaaaaggagtataccagagtgaacatttgtttgagtccgaccaccaatctggggcgtggtgcaaagaccctctgcaggcatctgacaagatttattatatgccctggactccctacagaactgataccctgactgagtattcatccaaggatgacttcattgctggaagaccaactacaacctacaagctccctcacagggtggatggcacaggatttgtagtgtatgatggagctttgttcttcaacaaagagcgcaccaggaacatagtaaagtttgatttgcggactaggataaagagtggagaggctatcatagcaaatgccaattaccatgatacctccccttaccgatggggaggcaaatctgacatagacctggcagtagatgagaatgggctatgggtaatctatgcaacagaacaaaacaatggtaaaattgtcattagtcaattgaacccttacaccctacggatcgaaggaacatgggatactgcatatgataaaaggtcagcttccaatgcctttatgatttgtggaattctgtatgtggtcaaatctgtatatgaggatgatgacaatgaggctactggaaataagattgactacatttacaacactgaccaaagcaaggatagtttggtggatgtaccctttcctaattcataccagtacattgcagctgtggattacaaccccagggacaacctactttatgtatggaataactatcacgtcgtgaaatattctttggattttggacctctggatagtagatcagggcaggcacatcatggacaagtttcatacatttctccgccaattcaccttgactctgagctagaaagaccctctgttaaagatatctctaccacaggacctcttggcatgggaagcactaccaccagtaccacccttcggaccacaactttgagcccaggaaggagtaccaccccgtcagtgtcaggaagaagaaaccggagtactagtaccccatctccagctgtcgaggtacttgatgacatgaccacacaccttccatcagcatcgtcccaaatcccagctctcgaagagagctgtgaggctgtggaagcccgagaaatcatgtggtttaagactcgtcaaggacagatagcaaagcagccatgccctgcaggaactataggtgtatcaacttatctatgccttgctcctgatggaatttgggatccccaaggtccagatctcagcaactgttcttctccttgggtcaatcatataacacagaagttgaaatctggtgaaacagctgccaacattgctagagagctggctgaacagacaagaaatcacttgaatgctggggacatcacctactctgtccgggccatggaccagctggtaggcctcctagatgtacagcttcggaacttgaccccaggtggaaaagatagtgctgcccggagtttgaacaagcttcagaaaagagagcgctcttgcagagcctatgtccaggcaatggtcgagacagttaacaacctccttcagccacaagctttgaatgcatggagagacctgactacgagtgatcagctgcgtgcggccaccatgttgcttcatactgtggaggaaagtgcttttgtgctggctgataaccttttgaagactgacattgtcagggagaatacagacaatattaaattggaagttgcaagactgagcacagaaggaaacttagaagacctaaaatttccagaaaacatgggccatggaagcactatccagctgtctgcaaataccttaaagcaaaatggccgaaatggagagatcagagtggcctttgtcctgtataacaacttgggtccttatttatccacggagaatgccagtatgaagttgggaacggaagctttgtccacaaatcattctgttattgtcaattcccctgttattacggcagcaataaacaaagagttcagtaacaaggtttatttggctgatcctgtggtatttactgttaaacatatcaagcagtcagaggaaaatttcaaccctaactgttcattttggagctactccaagcgtacaatgacaggttattggtcaacacaaggctgtcggctcctgacaacaaataagacacatactacatgctcttgtaaccacctaacaaattttgcagtactgatggcacatgtggaagttaagcacagtgatgcggtccatgacctccttctggatgtgatcacgtgggttggaattttgctgtcccttgtttgtctcctgatttgcatcttcacattttgctttttccgggggctccagagtgaccgtaacaccatccacaagaacctctgcatcagtctctttgtagcagagctgctcttcctgattgggatcaaccgaactgaccaaccaattgcctgtgctgttttcgctgccctgttacatttcttcttcttggctgccttcacctggatgttcctggagggggtgcagctttatatcatgctggtggaggtttttgagagtgaacattcacgtaggaaatacttttatctggtcggctatgggatgcctgcactcattgtggctgtgtcagctgcagtagactacaggagttatggaacagataaagtatgttggctccgacttgacacctacttcatttggagttttataggaccagcaactttgataattatgcttaatgtaatcttccttgggattgctttatataaaatgtttcatcatactgctatactgaaacctgaatcaggctgtcttgataacatcaactatgaggataacagacccttcatcaagtcatgggttataggtgcaatagctcttctctgcctattaggattgacctgggcctttggactcatgtatattaatgaaagcacagtcatcatggcctatctcttcaccattttcaattctctacagggaatgtttatatttattttccattgtgtcctacagaagaaggtacgaaaagagtatgggaaatgcctgcgaacacattgctgtagtggcaaaagtacagagagttccattggttcagggaaaacatctggttctcgaactcctggacgctactccacaggctcacagagccgaatccgtagaatgtggaatgacacggttcgaaagcagtcagagtcttcctttattactggagacataaacagttcagcgtcactcaacagaggagccatggctaatcatcttataagcaatgctctgcttcgtccgcatggtactaacaatccctataatacattgcttggggaaccggcggtctgtaacaacccttctgtcagcatgtacaacgcacaagagccctacagagagacaagtatgggagtaaagctaaacattgcatatcaaataggggcttctgaacaatgccagggatacaagtgtcatggatactctaccactgaatggtaaccatggcaatagttacagcattgccagcggcgaatacctgagcaactgtgtgcaaatcatagaccgtggctataaccataacgagaccgccctagagaaaaagattctgaaggaactcacttccaactatatcccttcttacctgaacaaccatgagcgctccagtgaacagaacaggaatctgatgaacaagctggtgaataaccttggcagtggaagggaagatgatgccattgtcctggatgatgccacctcgtttaaccacgaggagagtttgggcctggaactcattcatgaggaatctgatgctcctttgctgcccccaagagtatactccaccgagaaccaccagccacaccattataccagaaggcggatcccccaagaccacagtgagagctttttccctttgctaaccaacgagcacacagaagatctccagtcaccccatagagactctctctataccagcatgccgacactggctggtgtggccgccacagagagtgttaccaccagcacccagaccgaacccccaccggccaaatgtggtgatgccgaagatgtttactacaaaagcatgccaaacctaggctccagaaaccacgtccatcagctgcatacttactaccagctaggtcgcggcagcagtgatggatttatagttcctccaaacaaagatgggacccctcccgagggaagttcaaaaggaccggctcatttggtcactagtctatagaagatgacacagaaattggaaccaacaaaactgctaacaccttgttgactgttctgagttgatataagcagtggtaataatgtgtgtactcctaaatctttatgctgtcctctaaagacaaacacaaact

SEQ ID NO: 8478 - DNA, 788 bp, Homo sapiens
aataagtgaattaggttctggagtagaggctctcctacaaggacctccaggaacagactcagagctctttaataagtatcccagggagtcaggctttcttggaaaaaacaaattagtgtgagaagccagtactgtgcaatttcagttttaaaaatagccggtattgtcaaggctgctgtgtgcatgagagaaatagaaggtccttgttaattttcgtgtcagcttccacattaaaaccaagaagctccactgaaatccttgcctggcaaatactgcaaaggttataagtgaagaagattctttgggctataaagatgaagagtctacttcttctggtgctgatttcaatctgctgggctgatcatctttcagacaactatactctggatcatgacagagctattcacatccaagcagaaaatggcccccatctacttgtggaagcagagcaagccaaggtgttttcacacagaggtggcaatgttacactgccatgtaaattttatcgagaccctacagcatttggctcaggaatccataaaatccgaattaagtggaccaagctaacttcggattacctcaaggaagtggatgtttttgtttccatgggataccacaaaaaaacctatggaggctaccagggtagagtgtttctgaagggaggcagtgatagtgatgcttctctggtcatcacagacctcactctggaagattatgggagatataagtgtgaggtgattgaaggattagaagatgatactgttgtggtagcactggacttacaaggt

SEQ ID NO: 8479 - DNA, 567 bp, Homo sapiens
aaagggcccgctcgccgcgccgctctgggagccgctgctggtcccggccttgcggcctgcgggggaggctgcccggaggaggcagcggcggcggcagcgcgtcctcggtccccaggaccacggcttctttcctgccagagcgactctaccttggaaaccagggattccccttcccgtcgcccgccccatttgatatatgggcctgaaatgtatgccatcccatcaccatcggactggactgttcacagcactggagagacagaggtccttcattcactccaggtcacaggctgtgcgtgtgcatgccgaacacccacatgcacacagttggtggctcagtctgatgtacctgacttctcacgccttcccccagtcctccagtaccgtgcctctacatgggctgggcagccccaaactgaaatggccttgaccagatctggctgctccttgccatctgcctcgcctgccgcctcctctggaggctcgggttgccatcctacctgaagcatgcaagcaccgtggcaggcgggttcttcagcctctaccacttcttccagctgcacatgg

SEQ ID NO: 8480 - DNA, 6297 bp, Homo sapiens
agaaagcggacaggagggcgacttttctccgtcaggctggaactggtgccgctggaggcgggagcgggctggaggacggacagggtctggaaatgtttaatttggtaaattggaggaaaaaaacatggatttttagcaattgaagagcaaattaaggtttcagatttgggatattggtgtttctgttttggagaaattattctttttctttttaatttgaagaaaaatcatcagtcttggaatacagaagagaaactagaaatatacgtattttgtttcacatttgaacagtcattcttgaggaatactccatacctgagtagacagccatgtggccatcgcagctactaattttcatgatgctcttagctccaataattcatgctttcagccgtgccccaattccaatggctgtggtccgcagagagctatcctgtgagagctatcctatagagcttcgctgtccaggaacagacgtcatcatgatagaaagtgccaactatggcaggactgatgacaaaatttgtgactctgaccctgctcagatggagaatatccgatgttatctgccagatgcctataagattatgtctcaaagatgcaataacagaacccagtgtgcagtggtggcaggtcctgatgtttttccagacccgtgtccaggaacctataaataccttgaagtgcagtatgaatgtgtcccttacaaagtggaacaaaaagtttttctttgtcctggactactaaaaggagtataccagagtgaacatttgtttgagtccgaccaccaatctggggcgtggtgcaaagaccctctgcaggcatctgacaagatttattatatgccctggactccctacagaactgataccctgactgagtattcatccaaggatgacttcattgctggaagaccaactacaacctacaagctccctcacagggtggatggcacaggatttgtagtgtatgatggagctttgttcttcaacaaagagcgcaccaggaacatagtaaagtttgatttgcggactaggataaagagtggagaggctatcatagcaaatgccaattaccatgatacctccccttaccgatggggaggcaaatctgacatagacctggcagtagatgagaatgggctatgggtaatctatgcaacagaacaaaacaatggtaaaattgtcattagtcaattgaacccttacaccctacggatcgaaggaacatgggatactgcatatgataaaaggtcagcttccaatgcctttatgatttgtggaattctgtatgtggtcaaatctgtatatgaggatgatgacaatgaggctactggaaataagattgactacatttacaacactgaccaaagcaaggatagtttggtggatgtaccctttcctaattcataccagtacattgcagctgtggattacaaccccagggacaacctactttatgtatggaataactatcacgtcgtgaaatattctttggattttggacctctggatagtagatcagggcaggcacatcatggacaagtttcatacatttctccgccaattcaccttgactctgagctagaaagaccctctgttaaagatatctctaccacaggacctcttggcatgggaagcactaccaccagtaccacccttcggaccacaactttgagcccaggaaggagtaccaccccgtcagtgtcaggaagaagaaaccggagtactagtaccccatctccagctgtcgaggtacttgatgacatgaccacacaccttccatcagcatcgtcccaaatcccagctctcgaagagagctgtgaggctgtggaagcccgagaaatcatgtggtttaagactcgtcaaggacagatagcaaagcagccatgccctgcaggaactataggtgtatcaacttatctatgccttgctcctgatggaatttgggatccccaaggtccagatctcagcaactgttcttctccttgggtcaatcatataacacagaagttgaaatctggtgaaacagctgccaacattgctagagagctggctgaacagacaagaaatcacttgaatgctggggacatcacctactctgtccgggccatggaccagctggtaggcctcctagatgtacagcttcggaacttgaccccaggtggaaaagatagtgctgcccggagtttgaacaagcttcagaaaagagagcgctcttgcagagcctatgtccaggcaatggtcgagacagttaacaacctccttcagccacaagctttgaatgcatggagagacctgactacgagtgatcagctgcgtgcggccaccatgttgcttcatactgtggaggaaagtgcttttgtgctggctgataaccttttgaagactgacattgtcagggagaatacagacaatattaaattggaagttgcaagactgagcacagaaggaaacttagaagacctaaaatttccagaaaacatgggccatggaagcactatccagctgtctgcaaataccttaaagcaaaatggccgaaatggagagatcagagtggcctttgtcctgtataacaacttgggtccttatttatccacggagaatgccagtatgaagttgggaacggaagctttgtccacaaatcattctgttattgtcaattcccctgttattacggcagcaataaacaaagagttcagtaacaaggtttatttggctgatcctgtggtatttactgttaaacatatcaagcagtcagaggaaaatttcaaccctaactgttcattttggagctactccaagcgtacaatgacaggttattggtcaacacaaggctgtcggctcctgacaacaaataagacacatactacatgctcttgtaaccacctaacaaattttgcagtactgatggcacatgtggaagttaagcacagtgatgcggtccatgacctccttctggatgtgatcacgtgggttggaattttgctgtcccttgtttgtctcctgatttgcatcttcacattttgctttttccgggggctccagagtgaccgtaacaccatccacaagaacctctgcatcagtctctttgtagcagagctgctcttcctgattgggatcaaccgaactgaccaaccaattgcctgtgctgttttcgctgccctgttacatttcttcttcttggctgccttcacctggatgttcctggagggggtgcagctttatatcatgctggtggaggtttttgagagtgaacattcacgtaggaaatacttttatctggtcggctatgggatgcctgcactcattgtggctgtgtcagctgcagtagactacaggagttatggaacagataaagtatgttggctccgacttgacacctacttcatttggagttttataggaccagcaactttgataattatgcttaatgtaatcttccttgggattgctttatataaaatgtttcatcatactgctatactgaaacctgaatcaggctgtcttgataacatcaactatgaggataacagacccttcatcaagtcatgggttataggtgcaatagctcttctctgcctattaggattgacctgggcctttggactcatgtatattaatgaaagcacagtcatcatggcctatctcttcaccattttcaattctctacagggaatgtttatatttattttccattgtgtcctacagaagaaggtacgaaaagagtatgggaaatgcctgcgaacacattgctgtagtggcaaaagtacagagagttccattggttcagggaaaacatctggttctcgaactcctggacgctactccacaggctcacagagccgaatccgtagaatgtggaatgacacggttcgaaagcagtcagagtcttcctttattactggagacataaacagttcagcgtcactcaacagagaggggcttctgaacaatgccagggatacaagtgtcatggatactctaccactgaatggtaaccatggcaatagttacagcattgccagcggcgaatacctgagcaactgtgtgcaaatcatagaccgtggctataaccataacgagaccgccctagagaaaaagattctgaaggaactcacttccaactatatcccttcttacctgaacaaccatgagcgctccagtgaacagaacaggaatctgatgaacaagctggtgaataaccttggcagtggaagggaagatgatgccattgtcctggatgatgccacctcgtttaaccacgaggagagtttgggcctggaactcattcatgaggaatctgatgctcctttgctgcccccaagagtatactccaccgagaaccaccagccacaccattataccagaaggcggatcccccaagaccacagtgagagctttttccctttgctaaccaacgagcacacagaagatctccagtcaccccatagagactctctctataccagcatgccgacactggctggtgtggccgccacagagagtgttaccaccagcacccagaccgaacccccaccggccaaatgtggtgatgccgaagatgtttactacaaaagcatgccaaacctaggctccagaaaccacgtccatcagctgcatacttactaccagctaggtcgcggcagcagtgatggatttatagttcctccaaacaaagatgggacccctcccgagggaagttcaaaaggaccggctcatttggtcactagtctatagaagatgacacagaaattggaaccaacaaaactgctaacaccttgttgactgttctgagttgatataagcagtggtaataatgtgtgtactcctaaatctttatgctgtcctctaaagacaaacacaaactctcagacttttttttttttaatgggatttttaggtcagcccaggggagaaagataactgctaaaattcccctgtaccccatcctttcttgtcctttccccttcagatggagacttcattatgttaatgaacaagatatgaagaaaatggcactcattgtggccttgttgaattatgttgtgtatgttttaacatctctgatgctgtgttactaaaattacaaggacctgctttttaaaaggccagaacaattgtctgaaattagtaacaatgctgcatctagattggagtgctgcacaaacaaacataagagcaaagcaaaactgtatcacatagggtttttggtcactcacaacctgaattcaccacagctggaatagctgtggaaaacaaaataaaacaacaaaattaataatgaaatggaggggaattctagaattatatgctaaatgcatattttatgatttgctgtattaactgatgataaaactaatggcagaaaaagaagttgagcaatttctatgtaatgtacagatactagcattgcacatatagtctgctttctgttcctccagaatttgagtcctgttaatgtagtagaaaaaaaaaaaagaaattttctttttcttttgtgctggtcttgcaagtttgtctaccagtaagagagcaaagtttccttcctttcttctctttcttcattttctttttttcttttttgccttttattcctttaaaatttcgcctggcaaaaaataaataaatggaactatcactttataagaatcattttctagtaatgcaaacaaattattttttacaaaaaaacaaaataaataaaattagacttccttccctcactatatatctttatgcagtcagaatatttccaacagtgttttttgcaaattagagcaggacaaacttttatgtttacagggcacgtctgttgtaatgcaaagcatatttggcaagcagttcatcaccaggacactagctatgattctagaagtcaaaaggtgtctatagaactagtggggcttctgcatgtgaaaaacggttttccataggcattaaagtgctgaatgctcagtctgatcaacaagtgggcacctgcactaccactttttagaggaaattcactccctcgtaagcattggaaggtcaaattattttgaagtgatttttttaaaaaaaagtcttctgtttattaacaggaaaatttatttatttgacaggattttgagtaatgtaggaatacaaaaggtaaattagcagcacatataatttttttttaatttatgatccattttgtatggtctcaaagttggatgacctcattactaatatttgttgtaaaagtgaaacttgtttgccaaccaataaacaactgattgagatttagaagatattgtattgatgtatgtactat

SEQ ID NO: 8481 - DNA, 1405 bp, Homo sapiens
agagtccagccgggggtgccgcacccactggggagtggggagggaggacacataggaaatgcctggggctggagtctctttggctctctgccagcaagaaacttaaacgtcctggcttgctcaacccgagtgtccctaaactgtccagacttttgcccgtccattgccactatctctccccactctgggtgtcctacccaaggcgctgtctatgcgtgcccagggcctgtcctgcggatacccagctcgccccttgcagccctttttagagcatctcgcgggctctggcatcaccaagcgcacagccccgggctgcgctcccctaaggtgggtccctcagatccggggctgtccattaaccaggctggcccaaagaggcgcagacactcgaacccgggaaaacttattttattctcggttcccggggttgcagctgccagcggctgagacagtgcgtccgctttgtctctctgcactccccgcagcccccctctcccgcttcctctcccgattaactcccccgacacgctcttctctagctcctctcctcctcccactccttctcctcctcttcctcctcctacaccacaggccgcgctaatgcgcttcctccctcccccggtgtcggtctctttgcatacgcgccccctcccctccccgccgcgccacttatagcggggcgcacggcggcggggcgcagactgctctggcagccggagaggaggcggtgcggcggtggcgctgcggagacccggtccagacgcctggcggccgccggcacacaaggcgctttctagctccctcccccgagcgcacagcccgcctccttccgcggcgcctgcagtggcaggcttgctctgccctaccgtgacgcgctccggagacgctctgcgggtcctggacaccgggtccgcggcgtggggacgacagacggaggcgaacgccatcggtagccggtccgcgagccatcgttcggggcgcagtcctctccccggctggccctcctttctccggggcattcgccaccgcttccctgggctgagacgaccggttcgtcgcctccttgcccgtgaccgtcgctagaactcagttgtgcgttgcggccagtcgccactgctctggttttccaagaattgatataaagcgggaagaacagaaaacagcagtcataagtatgctactcaaaatattcttctttttatgtgccaaatcctcacattggaagctgtcccgagcaagacaggagtggaaacaaaatgtcagtcagtgtgcatgagaaccgcaagtccagggccagcagcggctccattaacatctatctgtttcacaagtcctcctacgctgacagcgtcctcactcacctgaatcttttacgccagcagcgtctcttcactgacgtccttct

SEQ ID NO: 8482 - DNA, 5650 bp, Homo sapiens
ccggccggaaggcttgcgccagctcaggatgaggacaggctgggcgacccctcgccgcccggcggggctcctcatgctgctcttctggttcttcgatctcgcggagccctctggccgcgcagctaatgaccccttcaccatcgtccatggaaatacgggcaagtgcatcaagccagtgtatggctggatagtagcagacgactgtgatgaaactgaggacaagttatggaagtgggtgtcccagcatcggctctttcatttgcactcccaaaagtgccttggcctcgatattaccaaatcggtaaatgagctgagaatgttcagctgtgactccagtgccatgctgtggtggaaatgtgagcaccactctctgtacggagctgcccggtaccggctggctctgaaggatggacatggcacagcaatctcaaatgcatctgatgtctggaagaaaggaggctcagaggaaagcctttgtgaccagccttatcatgagatctataccagagatgggaactcttatgggagaccttgtgaatttccattcttaattgatgggacctggcatcatgattgcattcttgatgaagatcatagtgggccatggtgtgccaccaccttaaattatgaatatgaccgaaagtggggcatctgcttaaagcctgaaaacggttgtgaagataattgggaaaagaacgagcagtttggaagttgctaccaatttaatactcagacggctctttcttggaaagaagcttatgtttcatgtcagaatcaaggagctgatttactgagcatcaacagtgctgctgaattaacttaccttaaagaaaaagaaggcattgctaagattttctggattggtttaaatcagctatactctgctagaggctgggaatggtcagaccacaaaccattaaactttctcaactgggatccagacaggcccagtgcacctactataggtggctccagctgtgcaagaatggatgctgagtctggtctgtggcagagcttttcctgtgaagctcaactgccctatgtctgcaggaaaccattaaataatacagtggagttaacagatgtctggacatactcagatacccgctgtgatgcaggctggctgccaaataatggattttgctatctgctggtaaatgaaagtaattcctgggataaggcacatgcgaaatgcaaagccttcagtagtgacctaatcagcattcattctctagcagatgtggaggtggttgtcacaaaactccataatgaggatatcaaagaagaagtgtggataggccttaagaacataaacataccaactttatttcagtggtcagatggtactgaagttactctaacatattgggatgagaatgagccaaatgttccctacaataagacgcccaactgtgtttcctacttaggagagctaggtcagtggaaagtccaatcatgtgaggagaaactaaaatatgtatgcaagagaaagggagaaaaactgaatgacgcaagttctgataagatgtgtcctccagatgagggctggaagagacatggagaaacctgttacaagatttatgaggatgaggtcccttttggaacaaactgcaatctgactatcactagcagatttgagcaagaatacctaaatgatttgatgaaaaagtatgataaatctctaagaaaatacttctggactggcctgagagatgtagattcttgtggagagtataactgggcaactgttggtggaagaaggcgggctgtaaccttttccaactggaattttcttgagccagcttccccgggcggctgcgtggctatgtctactggaaagtctgttggaaagtgggaggtgaaggactgcagaagcttcaaagcactttcaatttgcaagaaaatgagtggaccccttgggcctgaagaagcatcccctaagcctgatgacccctgtcctgaaggctggcagagtttccccgcaagtctttcttgttataaggtattccatgcagaaagaattgtaagaaagaggaactgggaagaagctgaacgattctgccaagcccttggagcacacctttctagcttcagccatgtggatgaaataaaggaatttcttcactttttaacggaccagttcagtggccagcattggctgtggattggtttgaataaaaggagcccagatttacaaggatcctggcaatggagtgatcgtacaccagtgtctactattatcatgccaaatgagtttcagcaggattatgacatcagagactgtgctgctgtcaaggtatttcataggccatggcgaagaggctggcatttctatgatgatagagaatttatttatttgaggccttttgcttgtgatacaaaacttgaatgggtgtgccaaattccaaaaggccgtactccaaaaacaccagactggtacaatccagaccgtgctggaattcatggacctccacttataattgaaggaagtgaatattggtttgttgctgatcttcacctaaactatgaagaagccgtcctgtactgtgccagcaatcacagctttcttgcaactataacatcttttgtgggactaaaagccatcaaaaacaaaatagcaaatatatctggtgatggacagaagtggtggataagaattagcgagtggccaatagatgatcattttacatactcacgatatccatggcaccgctttcctgtgacatttggagaggaatgcttgtacatgtctgccaagacttggcttatcgacttaggtaaaccaacagactgtagtaccaagttgcccttcatctgtgaaaaatataatgtttcttcgttagagaaatacagcccagattctgcagctaaagtgcaatgttctgagcaatggattccttttcagaataagtgttttctaaagatcaaacccgtgtctctcacattttctcaagcaagcgatacctgtcactcctatggtggcacccttccttcagtgttgagccagattgaacaagactttattacatccttgcttccggatatggaagctactttatggattggtttgcgctggactgcctatgaaaagataaacaaatggacagataacagagagctgacgtacagtaactttcacccattattggttagtgggaggctgagaataccagaaaatttttttgaggaagagtctcgctaccactgtgccctaatactcaacctccaaaaatcaccgtttactgggacgtggaattttacatcctgcagtgaacgccactttgtgtctctctgtcagaaatattcagaagttaaaagcagacagacgttgcagaatgcttcagaaactgtaaagtatctaaataatctgtacaaaataatcccaaagactctgacttggcacagtgctaaaagggagtgtctgaaaagtaacatgcagctggtgagcatcacggacccttaccagcaggcattcctcagtgtgcaggcgctccttcacaactcttccttatggatcggactcttcagtcaagatgatgaactcaactttggttggtcagatgggaaacgtcttcattttagtcgctgggctgaaactaatgggcaactcgaagactgtgtagtattagacactgatggattctggaaaacagttgattgcaatgacaatcaaccaggtgctatttgctactattcaggaaatgagactgaaaaagaggtcaaaccagttgacagtgttaaatgtccatctcctgttctaaatactccgtggataccatttcagaactgttgctacaatttcataataacaaagaataggcatatggcaacaacacaggatgaagttcatactaaatgccagaaactgaatccaaaatcacatattctgagtattcgagatgaaaaggagaataactttgttcttgagcaactgctgtacttcaattatatggcttcatgggtcatgttaggaataacttatagaaataagtctcttatgtggtttgataagaccccactgtcatatacacattggagagcaggaagaccaactataaaaaatgagaagtttttggctggtttaagtactgacggcttctgggatattcaaacctttaaagttattgaagaagcagtttattttcaccagcacagcattcttgcttgtaaaattgaaatggttgactacaaagaagaatataatactacactgccacagtttatgccatatgaagatggtatttacagtgttattcaaaaaaaggtaacatggtatgaagcattaaacatgtgttctcaaagtggaggtcacttggcaagcgttcacaaccaaaatggccagctctttctggaagatattgtaaaacgtgatggatttccactatgggttgggctctcaagtcatgatggaagtgaatcaagttttgaatggtctgatggtagtacatttgactatatcccatggaaaggccaaacatctcctggaaattgtgttctcttggatccaaaaggaacttggaaacatgaaaaatgcaactctgttaaggatggtgctatttgttataaacctacaaaatctaaaaagctgtcccgtcttacatattcatcaagatgtccagcagcaaaagagaatgggtcacggtggatccagtacaagggtcactgttacaagtctgatcaggcattgcacagtttttcagaggccaaaaaattgtgttcaaaacatgatcactctgcaactatcgtttccataaaagatgaagatgagaataaatttgtgagcagactgatgagggaaaataataacattaccatgagagtttggcttggattatctcaacattctgttgaccagtcttggagttggttagatggatcagaagtgacatttgtcaaatgggaaaataaaagtaagagtggtgttggaagatgtagcatgttgatagcttcaaatgaaacttggaaaaaagttgaatgtgaacatggttttggaagagttgtctgcaaagtgcctctggactgtccttcatctacttggattcagttccaagacagttgttacatttttctccaagaagccatcaaagtagaaagcatagaggatgtcagaaatcagtgtactgaccatggagcggacatgataagcatacataatgaagaagaaaatgcttttatactggatactttgaaaaagcaatggaaaggcccagatgatatcctactaggcatgttttatgacacagatgatgcgagtttcaagtggtttgataattcaaatatgacatttgataagtggacagaccaagatgatgatgaggatttagttgacacctgtgcttttctgcacatcaagacaggtgaatggaaaaaaggaaattgtgaagtttcttctgtggaaggaacactatgcaaaacagctatcccatacaaaaggaaatatttatcagataaccacattttaatatcagcattggtgattgctagcacggtaattttgacagttttgggagcaatcatttggttcctgtacaaaaaacattctgattctcgtttcaccacagttttttcaaccgcaccccaatcaccttataatgaagactgtgttttggtagttggagaagaaaatgaatatcctgttcaatttgactaa

SEQ ID NO: 8483 - DNA, 799 bp, Homo sapiens; identical to SEQ ID NO: 6434

SEQ ID NO: 8484 - DNA, 1025 bp, Homo sapiens
agatcatgagccatcagctcctctggggccagctataggacaacagaactctcaccaaaggaccagacacagtgggcaccatgggacagtgtcggtcagccaacgcagaggatgctcaggaattcagtgatgtggagagggccattgagaccctcatcaagaactttcaccagtactccgtggagggtgggaaggagacgctgaccccttctgagctacgggacctggtcacccagcagctgccccatctcatgccgagcaactgtggcctggaagagaaaattgccaacctgggcagctgcaatgactctaaactggagttcaggagtttctgggagctgattggagaagcggccaagagtgtgaagctggagaggcctgtccgggggcactgagaactccctctggaattcttggggggtgttggggagagactgtgggcctggagataaaacttgtctcctctaccaccaccctgtaccctagcctgcacctgtcctcatctctgcaaagttcagcttccttccccaggtctctgtgcactctgtcttggatgctctggggagctcatgggtggaggagtctccaccagagggaggctcaggggactggttgggccagggatgaatatttgagggataaaaattgtgtaagagccaaagaattggtagtagggggagaacagagaggagctgggctatgggaaatgatttgaataatggagctgggaatatggctggatatctggtactaaaaaagggtctttaagaacctacttcctaatctcttccccaatccaaaccatagctgtctgtccagtgctctcttcctgcctccagctctgccccaggctcctcctagactctgtccctgggctagggcaggggaggagggagagcagggttgggggagaggctgaggagagtgtgacatgtggggagaggaccagctgggtgcttgggcattgacagaatgatggttgttttgtatcatttgattaataaaaaaaaatgaaaaaagtgaaa

SEQ ID NO: 8485 - DNA, 1745 bp, Homo sapiens
ataggcagaggccaccctccccgcctccccgcccgctgcgcgcccgccccgccccggctcactttaaaagtttactcgggccgggacgcagggcaaagcgagccatggctgtctacgtcgggatgctgcgcctggggaggctgtgcgccgggagctcgggggtgctgggggcccgggccgccctctctcggagttggcaggaagccaggttgcagggtgtccgcttcctcaggtgtctgtgaacccagcctaccaggctatggaactggagtatgtcctcaagaaggtgggctgcaaggcccttgtgttccccaagcaattcaagacccagcaatactacaacgtcctgaagcagatctgtccagaagtggagaatgcccagccaggggccttgaagagtcagaggctcccagatctgaccacagtcatctcggtggatgcccctttgccggggaccctgctcctggatgaagtggtggcggctggcagcacacggcagcatctggaccagctccaatacaaccagcagttcctgtcctgccatgaccccatcaacatccagttcacctcggggacaacaggcagccccaagggggccaccctctcccactacaacattgtcaacaactccaacattttaggagagcgcctgaaactgcatgagaagacaccagagcagttgcggatgatcctgcccaaccccctgtaccattgcctgggttccgtggcaggcacaatgatgtgtctgatgtacggtgccaccctcatcctggcctctcccatcttcaatggcaagaaggcactggaggccatcagcagagagagaggcaccttcctgtatggtacccccacgatgttcgtggacattctgaaccagccagacttctccagttatgacatctcgaccatgtgtggaggtgtcattgctgggtcccctgcacctccagagttgatccgagccatcatcaacaagataaatatgaaggacctggtggttgcttatggaaccacagagaacagtcccgtgacattcgcgcacttccctgaggacactgtggagcagaaggcagaaagcgtgggcagaattatgcctcacacggaggcccggatcatgaacatggaggcagggacgctggcaaagctgaacacgcccggggagctgtgcatccgagggtactgcgtcatgctgggctactggggtgagcctcagaagacagaggaagcagtggatcaggacaagtggtattggacaggagatgtcgccacaatgaatgagcagggcttctgcaagatcgtgggccgctctaaggatatgatcatccggggtggtgagaacatctaccccgcagagctcgaggacttctttcacacacacccgaaggtgcaggaagtgcaggtggtgggagtgaaggacgatcggatgggggaagagatttgtgcctgcattcggctgaaggacggggaggagaccacggtggaggagataaaagctttctgcaaagggaagatctctcacttcaagattccgaagtacatcgtgtttgtcacaaactaccccctcaccatttcaggaaagatccagaaattcaaacttcgagagcagatggaacgacatctaaatctgtgaataaagcagcaggcctgtcctggccggttggcttgactctctcctgtcagaatgcaacctggctttatgcacctagatgtccccagcacccagttctgagccaggcacatcaaatgtc

SEQ ID NO: 8486 - DNA, 671 bp, Homo sapiens
agttcccagattcacactgaatttccatcatggagctggtccttgaggcgggcccagggcatgggaaaggagggagggagggttgggagctcttggtgcctgcttaaagagacagcatcaggatcaacacagtcccttgatgaacctggatctgtgcttgttagagtgctgtgcaagatgtctggtaggggccccctttgcttccctggtggccactggattgtgtttctttggggtggcactgttctgtggctgtggacatgaagccctcactggcacagaaaagctaattgagacctatttctccaaaaactaccaagactatgagtatctcatcaatgtgatccatgccttccagtatgtcatctatggaactgcctctttcttcttcctttatggggccctcctgctggctgagggcttctacaccaccggcgcagtcaggcagatctttggcgactacaagaccaccatctgcggcaagggcctgagcgcaacgtttgtgggcatcacctatgccctgaccgttgtgtggctcctggtgtttgcctgctctgctgtgcctgtgtacatttacttcaacacctggaccacctgccagtctattgccttccccagcaagacctctgccagtataggcagtctctgtgctgatgccagaatgtatggtg

SEQ ID NO: 8487 - DNA, 1058 bp, Homo sapiens
ttgtggggacattttgcagggtatctgcttatctcacatacacctatgttttaataagtgatgcaacattgcatattttctaaaccaagaaaaattaagcaagtgtttaagtgatttttccttttgatagtgggttaattggacttcatcaaagaaaatggtatctgcaaaactgctttgcatgttataaaaatgcttatttcacaacttgcttttcacataacctcttaccattaatttgcctaacagacattgatcgccctaaaggactggcattcactgatgtggatgtcgattccatcaaaattgcttgggaaagcccacaggggcaagtttccaggtacagggtgacctactcgagccctgaggatggaatccatgagctattccctgcacctgatggtgaagaagacactgcagagctgcaaggcctcagaccgggttctgagtacacagtcagtgtggttgccttgcacgatgatatggagagccagcccctgattggaacccagtccacagctattcctgcaccaactgacctgaagttcactcaggtcacacccacaagcctgagcgcccagtggacaccacccaatgttcagctcactggatatcgagtgcgggtgacccccaaggagaagaccggaccaatgaaagaaatcaaccttgctcctgacagctcatccgtggttgtatcaggacttatggtggccaccaaatatgaagtgagtgtctatgctcttaaggacactttgacaagcagaccagctcagggagttgtcaccactctggagaatgtcagcccaccaagaagggctcgtgtgacagatgctactgagaccaccatcaccattagctggagaaccaagactgagacgatcactggcttccaagttgatgccgttccagccaatggccagactccaatccagagaaccatcaagccagatgtcagaagctacaccatcacaggtttacaaccaggcactgactacaagatctacctgtacaccttgaatgacaatgctcggagctcccctgtggtcatcgacgcctcc

SEQ ID NO: 8488 - DNA, 572 bp, Homo sapiens
attcatttgatgaaattgtaaatgccgatcatccaacttaacaggaactgcacatttgttcctttctagttagaaaaaaataaaatgttgccagttaatagagcagatctctctgtggaaatatgtagccgaggttcgagttgtttgcaaataaaatagaaagctcttctgtcttctctttgttaacagtcctcagaggatgagcaggcttttgttagcaaatccggctccagctttgaaacccagcaccaccacctgcttcactgcctggaaaaaaccacgaatcacgagtttgtggacgaacaagtctttgaagaaagctgcatggaagttgcaactgttaatcgtccttcaagtcacagtccttcactgtcttcacaacaaggagtcaccagcacctgctgttcacgacgacacaaaaaaacttttcgcatcccaaatgccaatgtatcaggaagccatcaaggtagtatacaagaactcagcacgattcagatcagatgtgtggagagaacacctctgtctaacagccgatccagtttaaatgccaaaatggaagagtgtgttaaact

SEQ ID NO: 8489 - DNA, 333 bp, Homo sapiens
ctggtctccggggacgagagcagcttgttgctgaacgcggccagcacggtcgcgcgtccggtgttcaccgagtatcaggccagtgcgtttgggaatgtcaagctggtggtccacgactgtcccgtctggaagagttaccttgtacatgcccactatgtacctcagacagagggagctgtgttagtacaactgaagggatccaacttgcaaaagaactaggagcgacctatcttgaactccacagccttgatgacttctacataggaaagtattttggaggagtgttggagtattttatgattcaagccttaaatcagaagacaagtgaaaaaa

SEQ ID NO: 8490 - DNA, 1273 bp, Homo sapiens
gggctctggaggggctcggagaccaggggagctgtcaaggctgcggcggggaccagagaggagcctggcgggggtggctgggtggctgggggaatccccccaacttcccatcgcaggcgcagctctctcggccgcctatttcctccgaaacccgcgctgcggagcagcccagtgcatagagttcaacacttccccttgttgtggaaagtaaaggagcctcactaccacctttttttctttgcgttttcttactgctggtcctgggagccttttccttcggagcagcagccctgtccggcatctgtcttgagctcccagcaaggaaagtccatcagcttgataatggaggagaacaatgactccacggagaacccccaacaaggccaagggcggcagaatgccatcaagtgtgggtggctgaggaagcaaggaggctttgtcaagacttggcatactcgctggtttgtgctcaagggggatcagctctattatttcaaagatgaagatgaaaccaagcccttgggtactatttttctgcctggaaataaagtttctgagcatccctgcaatgaagagaacccagggaagttcctttttgaagtagttccaggaggcgatcgagatcggatgacagcaaatcatgaaagctacctcctcatggcaagcacccagaatgatatggaagactgggtgaagtcaatccgccgagtcatatggggacctttcggaggaggcatttttggacagaaactggaggatactgttcgttatgagaagagatatgggaaccgtctggctccgatgttggtggagcagtgcgtggactttatccgacaaagggggctgaaagaagagggtctctttcgactgccaggccaggctaatcttgttaaggagctccaagatgcctttgactgtggggagaagccatcatttgacagcaacacagatgtacacacggtggcatcacttcttaagctgtacctccgagaacttccagaaccagttattccttatgcgaagtatgaagattttttgtcatgtgccaaactgctcagcaaggaagaggaagcagtaagttgatgcatttatttccaaataagcttttgtttggaatttttttctgtgttcttagtcttaaatctgtaaatttccattgccctatcccggtgttactctccactatcctttgaattgacctcacacacactgagactttccgtatacagctcaagcaccatttccgatcccctctctgatcaaaaaaaaagaa

SEQ ID NO: 8491 - DNA, 596 bp, Homo sapiens
attgcccgctcggcgtccggcccccgacccgcgctcgtccgcccgcccgcccgcccgcccgcgccatgaacgccaaggtcgtggtcgtgctggtcctcgtgctgaccgcgctctgcctcagcgacgggaagcccgtcagcctgagctacagatgcccatgccgattcttcgaaagccatgttgccagagccaacgtcaagcatctcaaaattctcaacactccaaactgtgcccttcagattgtgtaagtcttgaaattgaacatcatctaacgaacatagttgcatctaacgaacatagtaacatctaacccgagtcttattaaaggtgtagaggtgacaagccaagtgtccaaccttgaacttggcataattagtggcagctattcttatcatgaggacctttagtatgccaccaggcattaattttaaaagccgctcttggcctgggcaccctgctgtgctcgtagtagttctctcttctttccaaacctgtgttcttcagcacagcacagctggatgctggagaaactatgggcttcaccaaggttttggctgaagcctagtaaattagccagcccttagctaataacagtg

SEQ ID NO: 8492 - DNA, 592 bp, Homo sapiens
tgatgctgttgctgtgcctgggggtcccgaccggccgcccctacaacgtggacactgagagcgcgctgctttaccagggcccccacaacacgctgttcggctactcggtcgtgctgcacagccacggggcgaaccgatggctcctagtgggtgcgcccactgccaactggctcgccaacgcttcagtgatcaatcccggggcgatttacagatgcaggatcggaaagaatcccggccagacgtgcgaacagctccagctgggtagccctaatggagaaccttgtggaaagacttgtttggaagagagagacaatcagtggttgggggtcacactttccagacagccaggagaaaatggatccatcgtggtaggtattggaactggtccacagatccatcgtgaaatcagctatcctgggtgcagctttcacatcatttggtctacttttattttattcagacttgtgggcatagatggaaaaatatattttacataaagaatgaaaataagctccccactggtggttgctatggagtgccccctgatttacgaacagaactgagtaaaagaatagctccgtgttatcaaggt

SEQ ID NO: 8493 - DNA, 342 bp, Homo sapiens
agcatcaaggagggaggcaggaccaggccccaggtggtcagcctgcccaacatgagggtgcagaagtgcagctgtgcctcggatggggcgctcgtgccaaggaggctccagccataggcgcctggtgtatccattgagccctctaactgaacgtgtgcatagaggtggtcttaatgagcaataatggggaatgagagcaacacaatgatctgaagaaaggacccccaacctctagggcgcaagactataatagttaaatttatatagatgaggctttcatttatgatatttctattttctcacacaactctcattccaaaaatattaaacaatcactcacgg

SEQ ID NO: 8494 - DNA, 3576 bp, Homo sapiens
ctgcccctccatttgctccccttcctttctctctctcccttcccggctcctagactgggtctaggcaggagcttcgccatgatgtcaggagggaaggagatgcctctgggcctcgtaccacagcctcagctctctctctgcccctccatctgagtccctcctggctcccagctccctcagggtgcaaggccaagcctccaaggaatccctccccttacctgcatggctggagccaagacaggtttagcagctccattcttccccagagagccactccatctgagggtggctgcgtgtccacatacgaggggacagggctgaggatgaggagaaccctggggacccagaagaccgtgccttgcctggaagtcctgcctgtaggcctgaaggacttgccctaacagagcctcaacaactacctggtgattcctacttcagccccttggtgtgagcagcttctcaacatgaactacagcctccacttggccttcgtgtgtctgagtctcttcactgagaggatgtgcatccaggggagtcagttcaacgtcgaggtcggcagaagtgacaagctttccctgcctggctttgagaacctcacagcaggatataacaaatttctcaggcccaattttggtggagaacccgtacagatagcgctgactctggacattgcaagtatctctagcatttcagagagtaacatggactacacagccaccatatacctccgacagcgctggatggaccagcggctggtgtttgaaggcaacaagagcttcactctggatgcccgcctcgtggagttcctctgggtgccagatacttacattgtggagtccaagaagtccttcctccatgaagtcactgtgggaaacaggctcatccgcctcttctccaatggcacggtcctgtatgccctcagaatcacgacaactgttgcatgtaacatggatctgtctaaataccccatggacacacagacatgcaagttgcagctggaaagctggggctatgatggaaatgatgtggagttcacctggctgagagggaacgactctgtgcgtggactggaacacctgcggcttgctcagtacaccatagagcggtatttcaccttagtcaccagatcgcagcaggagacaggaaattacactagattggtcttacagtttgagcttcggaggaatgttctgtatttcattttggaaacctacgttccttccactttcctggtggtgttgtcctgggtttcattttggatctctctcgattcagtccctgcaagaacctgcattggagtgacgaccgtgttatcaatgaccacactgatgatcgggtcccgcacttctcttcccaacaccaactgcttcatcaaggccatcgatgtgtacctggggatctgctttagctttgtgtttggggccttgctagaatatgcagttgctcactacagttccttacagcagatggcagccaaagatagggggacaacaaaggaagtagaagaagtcagtattactaatatcatcaacagctccatctccagctttaaacggaagatcagctttgccagcattgaaatttccagcgacaacgttgactacagtgacttgacaatgaaaaccagcgacaagttcaagtttgtcttccgagaaaagatgggcaggattgttgattatttcacaattcaaaaccccagtaatgttgatcactattccaaactactgtttcctttgatttttatgctagccaatgtattttactgggcatactacatgtatttttgagtcaatgttaaatttcttgcatgccataggtcttcaacaggacaagataatgatgtaaatggtattttaggccaagtgtgcacccacatccaatggtgctacaagtgactgaaataatatttgagtctttctgctcaaagaatgaagctccaaccattgttctaagctgtgtagaagtcctagcattataggatcttgtaatagaaacatcagtccattcctctttcatcttaatcaaggacattcccatggagcccaagattacaaatgtactcagggctgtttattcggtggctccctggtttgcatttacctcatataaagaatgggaaggagaccattgggtaaccctcaagtgtcagaagttgtttctaaagtaactatacatgttttttactaaatctctgcagtgcttataaaatacattgttgcctatttagggagtaacattttctagtttttgtttctggttaaaatgaaatatgggcttatgtcaattcattggaagtcaatgcactaactcaataccaagatgagtttttaaataatgaatattatttaataccacaacagaattatccccaatttccaataagtcctatcattgaaaattcaaatataagtgaagaaaaaattagtagatcaacaatctaaacaaatccctcggttctaagatacaatggattccccatactggaaggactctgaggctttattcccccactatgcatatcttatcattttattattatacacacatccatcctaaactatactaaagcccttttcccatgcatggatggaaatggaagatttttttttaacttgttctagaagtcttaatatgggctgttgccatgaaggcttgcagaattgagtccattttctagctgcctttattcacatagtgatggggtactaaaagtactgggttgactcagagagtcgctgtcattctgtcattgctgctactctaacactgagcaacactctcccagtggcagatcccctgtatcattccaagaggagcattcatccctttgctctaatgatcaggaatgatgcttattagaaaacaaactgcttgacccaggaacaagtggcttagcttaagtaaacttggctttgctcagatccctgatccttccagctggtctgctatgagtggcttatcccgcatgagcaggagcgtgctggccctgagtactgaactttctgagtaacaatgagatacgttacagaacctatgttcaggttgcgggtgagctgccctctccaaatccagccagagatgcacattcctcggccagtctcagccaacagtaccaaaagtgatttttgagtgtgccagggtaaaggcttccagttcagcctcagttattttagacaatctcgccatctttaatttcttagcttcctgttctaataaatgcacggctttacctttcctgtcagaaataaaccaaggctctaaaagatgatttcccttctgtaactccctagagccacaggttctcattccttttcccattatacttctcacaattcagtttctatgagtttgatcacctgatttttttaacaaaatatttctaacgggaatgggtgggagtgctggtgaaaagaggtgaaatgtggttgtatgagccaatcatatttgtgattttttaaaaaaagtttaaaaggaaatatctgttctgaaaccccacttaagcattgtttttatataaaaacaatgataaagatgtgaaactgtgaaataaatataccatattagctacccaccaaa

SEQ ID NO: 8495 - DNA, 2515 bp, Homo sapiens
cccatggctccaatcatgttttgggtatagtaggtattcagtaaatatttgttcagttgcaaaatttcatcacattccctataagccaccacaaattattctgtgaataaaggaagtcataaagaataaatgattatatatatacatatatatatatattggcttcataggaattatgaatcttatggcagaaatcagtagtagaataaataaaagtgatagttccaaagctgtttttcaaattcagattttattaagtttcacgtcatgcctaatttttattaggactttacccagaaattttcctttcctttcacagctcgtaaaacttctctattaagaacactgaatctatccttcctttacaagttaaagtgttccaaactttaaacttgaatgttttctaaaatagaatgactgtagtggcatgtagctgtatctcagagtctaaaatactgcctggcagatagaaagctctgagtaaataattggtgaatgaataattataattagttttagttttttaattcataatttagggtgaaataagattttaattataaagcaagattatgaggtttgtggaaaaaaagatatactaaaaatactccttttcatttatttattttattggaattaaattttttagctgcaaaatgattactgtagaactttaccagtattcttttgatttcttaaaatagaaaccttaagtaggtttaattatgccctctggtgactagaataagaaaatgcaaaagatacatctttgtaagaactttcaaactacttttgactcctaatagtgactttagttttcacaaatagttctgaggaaggtattattattattttctttttctggttatgctaaaataggattttcatcagagactctacaagtcacagaatatgacagaggaaaatgtttagacaatgagataaataaaaataaaagttccatcttgtatattaattgcattttttcccaaactcgagttatttccctaaaaagcttacaaatttaattggtatacatctaattagtaaaatatgagaatattctaaatatctagtaacatgttaatttttatttctcatagcaagatgatgatcattgattctagagatgtgaataaaatactttgagactaaagttagtgaattgcaagctgatagattttgataatctgcagtggaatttgtctttttatctcttaattttaaagacacattaaaaaatcagctgattactattgttttgtaacctttaaagtttaaaaaatatgagccaattaatgatactgccaagtaatatggaaattagacttaattatgcagatataactttctctcttcagaaagatagatgtcacagtgaatttaaaaccagattatttctcttaagtcagctttaggtctttagtagaaatgtgcaatttgtttcaaactacattgccaagcattttctcattcctttttttttttccaggcaagaactgcctccctttgacagatggctaaatttcatggactctcttttaaaattatgtttaactttaccccttctcctaattttagcctaaatccatttaaccttctatctgcaagacttgctctctcccctaatcctttttcccttttcttcccaaaagggtattctttaccccttggcactctttttaccttctctctcattcctcgtgaatgactcctaaatgtttcttcctcattctttctgccctggtagcatgtctgtctttgaggattccatgtagataaaaaatacctccaaggattcccagaccacagtttgggtaacactggttaattaacattttaatttaacataaagcttccaaaattttcccatgccaaatttctatcttctaccattcctattttctcatttgtcctcatgcagggactatcctcacatgtattatttttaatgcagcaaaagaagaagaatgataaatcaccaacaaacaggtttgtgagtgttcccaatctaagtgctctggaatctggtggagtgggcaatggacatcctaaccgcctggatcccattcctaattctccagtccacgatattgagttcaacagcagcaaaccacttccacagccagtgccacctaaagggcccaagacatttttgagtcctgctcagagtgaagcttctccagtggcttctccagatccccagcgccaggagtggtttgcccggtacttcacattctgaaagaattgtgttggcacagctctgtatagactgttactaagagcatgactttatacagattgttatgtaaataggctttcctatgtcaaacactgtgaatgagaaagtatttgtctctccaacttgaaaatgcactgtatttcctgtgatatttattggaatcattctataaggtactatattatgtgtgtaattataactgttatttttatttgagatggaagagtctttaacctttgtaattactgcataataaattttgttagaatcaaa

SEQ ID NO: 8496 - DNA, 766 bp, Homo sapiens
tgggaattatggttggtttgggtgtcttctgaacttttggtactaaacatttgccatctgtaaacacttactggacttacaatgattggagaagacacaggcatgtttgtagcaaagggaatataggacagctccaagatccggggcggcttatagtctttgcggaggaggttcttcttgaaatttttcctcaaatgtaaccaaaattgcctaaagaatgcgggaaacccacgtgacatgcggagattccaggtcgtggtgtctacgacagtcaatgtggatggccatgtcctggcagtctctgataacatgtttgtccataataattccaagcatgggcggagggctcggaggcttgacccctcggaaggtacgccctcttatctggaacatgctactccctgtatcaaagccatcagcccgagtgaaggatggacgacgggaggtgcgactgtgatcatcataggggacaatttctttgatgggttacaggtcatattcggtaccatgctggtctggagtgagttgatcactcctcatgccatccgtgtgcagacccctcctcggcacatccctggtgttgtggaagtcacactgtcctacaaatctaagcagttctgcaaaggaacaccaggcagattcatttatacagcgctcaacgaacccaccatcgattatggtttccagaggttacagaaggtcattcctcggcaccctggtgaccctgagcgtttgccaaaggtgaggatactgcctttttgtaatt

SEQ ID NO: 8497 - DNA, 1675 bp, Homo sapiens
tagagatagggtttcaccatgttggccaggctggtctcgaactcctgacctcaagtgatgcacctgccttagtctcccaaaatgctgggattacagccacgagccatcgtgcatgagccagccagaaatgcatctctttatgtgagaactttgatgctgttgatttcagcatttatagcaaaagacaatcccaaagagacaacacgcgtggctgtttttgtgagaattttggatgttaatgacaatgccccacagtttgctgtgttctatgacacttttgtatgtgaaaatgccagaccagggcagctaatacagactataagtgcagtagacaaagatgaccctttaggtggacagaaattttttttcagtttagctgctgtcaatccaaacttcacagtacaggataatgaagataatactgccagaatcttaaccagaaaaaatggattcaatagacatgaaatcagtacctatctcttgcctgtggtgatatcagacaatgattacccaattcagagcagcacaggcacactgaccattcgagtgtgtgcttgtgacagccaaggcaacatgcaatcctgcagtgctgaagccctgctcctccctgccggcctcagcactggggccttgatcgccatcctcctctgcatcatcattctactggttatagtagtactgtttgcagctctgaaaagacagcgaaaaaaagagcctctgatcttgtcaaaagaagatatcagagacaacattgtgagctataacgatgagggtggtggagaggaggacacccaggcctttgatatcggcaccctgaggaatcctgcagccattgaggaaaaaaagctccggcgagatattattccagaaacgttatttattcctcggaggactcctacagctccagataacacggacgtccgggatttcattaatgaaaggctaaaagagcatgatcttgaccccaccgcacccccctacgactcacttgcaacctatgcctatgaaggaaatgattccattgctgaatctctgagttcattagaatcaggtactactgaaggagaccaaaactacgattacctccgagaatggggccctcggtttaataagctagcagaaatgtatggtggtggggaaagtgacaaagactcttaacgtaggatatatgttctgttcaaacaagagaaagtaactctacccatgctgtctccacttcacaatatttgatattcaggagcattttcctgccagtcagcacaattttttttctcatttacttcttaatttgttcattaattacattaattctttcctgtaggatgtctcatggaatatatatgacattttatttaatcacttccaagagccaaagctatggaaatacagtgttgtccatcttagtaaataaaagataatttcagaaacatgaacaggatagttctcccttaagcaacctcacaaacaagccgcttctgttaggtacatgtcctgcccttgcaaatgaagcttttaaaaaggtgaagaaaaattttacagtatatcctgttctgtacattaaattaaaaaaacaaaaatgtacatgtgatgttagtaggtgtgatatgcaacctggtatacagacatttgtgcaatttcatttcatcaaattctatctgctaatgttttatattta

SEQ ID NO: 8498 - DNA, 909 bp, Homo sapiens
gaggagaaggaaggcatggaaagttccagccggttcgagagctaggttgtttacattcagagctctatcaataagaggaatacatattacagtgaattcgacaaccgcacaagttggcagttgataggtatatcgagaacagccagagactgctgctactttgaaacgtacgatagaggccctgatggacagaggagcaatagtgagggacttggaaaacctgggtgaacgagcgcttccttataggatctctgcccacagtcagcagcacaacagaggcgggtatttcttggtggatttttatgcacccaccgcagctgttgaaagcatggtggagcacttgtctcgagatatagatgtgattagagggaatattgtcaaacaccctctgacccaggaactaaaagaatgtgaagggattgtcccagtcccactcgcagaaaaattatattccacaaagaagaggaagaagtgagaagattcgccagattttagccttatatgtaattccttcacatttgggcagcatggacgagaaggaagaatttgcaagtttggcctttatataagcatgtgttgcaggtgctgtttgatttttctaaggtatttttagcccttgatcccctttgcttgcgagaggtggggaactgctcactgacagcttctctgtaacctgcagtaccagtggatcgttcttgattttgttttcattagtgtcatttctttgtcattgaggacttttccccttacaacagtaacaccattttttgaagagcaaaacttataatacctcctgggattgtgagctagtcattcagcctgtgtaaccatgtggaaataaaaattgacgaccaatgtattatatggacaacttttgctttgagtaataaacttgattgtaggaatgtg

SEQ ID NO: 8499 - DNA, 552 bp, Homo sapiens
gagctgggtgcgcgccgagcacaggagattgcctgcgtttaggaggtggctgcgttgtgggaaaagctatcaaggaagaaattgccaaaccatgtctttttttctgttttcagagtagttcacaacagatctgagtgttttaattaagcatggaatacagaaaacaacaaaaaacttaagctttaatttcatctggaattccacagagacaaggccactttatgtttcccaggctggactggaacccctgggctcaaatgatcctcctacctaagcctgcagagtagcgaggacttcagttttcttagctccctggacccggttgacctgttggctcttcccgctggctgctctatcacgtggtgctctccgactactcaccccgagtgtaaagaaccttcggctcgcgtgcttctgagctgctgtggatggcctcggctctctggactgtccttccgagtaggatgtcactgagatccctcaaatggagcctcctgctgctgtcactcctgagtttctttgtgatgtggtacctcagccttccccactaca

SEQ ID NO: 8500 - DNA, 1193 bp, Homo sapiens
gcggcgcgctgagcgagcaggcggggcgggagcgcccacagctcggagccaccaggcgctgacgaggagcccggctgagggaggatgcgccgctgacgcctgcgggagccgcgcgcctggggcgggaggatgctccagaggggcctctggccgtggcgcacgcggctgctgccgacccctggcacctggcgcccagcgcgcccgtggccgctgccgcctccgccccaggttttgcgtgtgaagctgtgtggaaatgtgaaatactaccagtcacaccattatagtaccgtggtgccacctgatgaaataacagttatttatagacatggccttcccttggtaacacttaccttgccatctagaaaagaacgttgtcaattcgtagtcaaaccaatgttgtcaacagttggttcattccttcaggacctacaaaatgaagataagggtatcaaaactgcagccatcttcacagcagatggcaacatgatttcagcttctaccttgatggatattttgctaatgaatgattttaaacttgtcattaataaaatagcatatgatgtgcagtgtccaaagagagaaaaaccaagtaatgagcacactgctgagatggaacacatgaaatctttggttcacagactatttacaatcttgcatttagaagagtctcagaaaaagagagagcaccatttactggagaaaattgaccacctgaaggaacagctgcagccccttgaacaggttaggaagcatcacggttgagtatatttgaaaataatacctagtgtttattgagtgctcctcatgtgagcatttttctgaatgctttccatatgctaattttctcctttacgcctcacaaaaaacctgtaagttcagtgcttttatcttcctcatttttcagatgaggaaactgagcaacagagctgtatcgctaatacatggtagagcctggacttgagctcacgtggcctgtgttcagagctgccatcttaaactctatgccatgcctcctctccagagatcagtcataatgtctctgtaaataagtataatatgagcagggcagcactagctggagtcctacctccctttcctttttagagaataggcccagagcccctgctgtgcctaacagaattgcagctggaaagttggtaatggctagcatctaaagttaatcaatggtgtgg

SEQ ID NO: 8501 - DNA, 963 bp, Homo sapiens
aacagaactgcagcctcaattcacagcacaagtgacgtactgggaacccttatgactgggactccttttccagtggccaaagacgcagttattctaggataggctggccatctaactaaagtcagcaaacgatgtcttagcagaaaaggggatgcagaatgctttgcagcaagaactcacctgtttcctttggaatatattaaacacaggtttcgagccactgtctacccttgcccagagcctgcggtggagcgcagagagatgttggagagcgtcaatgtgaggctggaagatttaatcaccgtcataacacaaacagagtctcaccgccagcgcctgctgcaggaagccgctgccaactggcactcctggctcatcaaggtgcagaagatgaaagctgtctaccacatcctgaacatgtgcaacatcgacgtcacccagcagtgtgtcatcgccgagatctggttcccggtggcagatgccacacgtatcaagagggcactggagcaaggcatggaactaagtggctcctccatggcccccatcatgaccacagtgcaatctaaaacagcccctcccacatttaacaggaccaataaattcacagctggcttccagaatattgttgatgcctatggtgtcggcagctaccgggagataaacccagccccctacaccatcatcactttccccttcctgttcgctgtgatgtttggagactgtggtcatggaaccgtgatgctcctggctgcactttggatgattctgaatgagagacgcttgctctcccagaagacagacaatgagatttggaacaccttcttccacgggcgctatctgatcctacttatgggcatcttctccatctacacgggtttgatctacaatgactgcttctccaagtccttgaacatctttggctcttcttggagtgtccaacccatgttcagaaacggcacatgg

SEQ ID NO: 8502 - DNA, 670 bp, Homo sapiens
tttaatatgtacaagaagttcaggagggaagcttcatctgctcaagacaggtggggttctgtctctaatagactgcacattgattgaggagccagatgcaagcgatgatgactctaaaggttctgggcaagtgtttgggcacctggattttaaaatagtggtggagcctcctgacgctgccgccttcactgttgtcttgttagcaccctcacgccaggagaaagctgcctggatgagtgacatcagtcagcgctctaaacatcctctacaagagtgccttatgctggacttttacttatataccctcaggatggcttcaatggcaaataaatagctagaaaagaagccatttcttttctgcctgacaaggaaatgaaaatatgggatcttccatttttgtggacttgcatccttgtggtgatttattcatacgttcattagctctatgctatatcaattaatagcatattaagtctctccctatttgtaacacatctcttactttatgaaactctggatcattcattgactctttgaacatttattgaggaatcaccatgtgctgtcaggtattgtgcaggtaccaggaatacgaccatggttcttgctctcagggagaataggcaggctcatagggagcaaaaggaagtaaacagctaaatgcaaaaaa

SEQ ID NO: 8503 - DNA, 4163 bp, Homo sapiens
attgatctgaagggtaaatgtggagggagccacagagaggggtccaggcttttctgagaagagaggcagcctcttccaggaagaaagtggtgtctactggctgcccggcctggagaaccttctttgaatgaaaacggacaaaatgcaaagcagtgtgttggcacagtgatttggaaaggggaaacagaagagaagggtctcaccttccgcgcaaggctgagctgttggcaccctgctgcggccgtcggtgctgctgctcctgcagctgccttttctgccatcagctttgttacctaacagcttggctcttttgggaaatatagacaagctggaacccaggagcagttgggagttttaaagaatgccagcctttttaaagacagtgaggagctcaacataacagggaaaaggagcacaggatgcagctacttggagggtgttgattgaaaacttcgatctccccaccccattcacggttgatttgacggatttctcacctcgttcacagagaaaatttcaattagcccctttagatggaatataatacagcagaagccttttcatcaaaaggattaatgcctgcatcatcatttctgcaataaaacaagaagctaagtggtggaggccacagacacctcaaacctggattccacaattctacgttaagtgttggagtttttattactctgctgtaggaaagcctttgccaatgcttacaaggaactgtttatccctgcttctctgggttctgtttgatggaggtctcctaacaccactacaaccacagccacagcagactttagccacagagccaagagaaaatgttatccatctgccaggacaacggtcacatttccaacgtgttaaacgtggctgggtatggaatcaattttttgtgctggaagaatacgtgggctccgagcctcagtatgtgggaaagctccattccgacttagacaagggagagggcactgtgaaatacaccctctcaggagatggcgctggcaccgtttttaccattgatgaaaccacaggggacattcatgcaataaggagcctagatagagaagagaaacctttctacactcttcgtgctcaggctgtggacatagaaaccagaaagcccctggagcctgaatcagaattcatcatcaaagtgcaggatattaatgataatgagccaaagtttttggatggaccttatgttgctactgttccagaaatgtctcctgtgggtgcatatgtactccaggtcaaggccacagatgcagatgacccgacctatggaaacagtgccagagtcgtttacagcattcttcagggacaaccttatttctctattgatcccaagacaggtgttattagaacagctttgccaaacatggacagagaagtcaaagaacaatatcaagtactcatccaagccaaggatatgggaggacagcttggaggattagccggaacaacaatagtcaacatcactctcaccgatgtcaatgacaatccacctcgattccccaaaagcatcttccacttgaaagttcctgagtcttcccctattggttcagctattggaagaataagagctgtggatcctgattttggacaaaatgcagaaattgaatacaatattgttccaggagatgggggaaatttgtttgacatcgtcacagatgaggatacacaagagggagtcatcaaattgaaaaagcctttagattttgaaacaaagaaggcatacactttcaaagttgaggcttccaaccttcaccttgaccaccggtttcactcggcgggccctttcaaagacacagctacggtgaagatcagcgtgctggacgtagatgagccaccggttttcagcaagccgctctacaccatggaggtttatgaagacactccggtagggaccatcattggcgctgtcactgctcaagacctggatgtaggcagcagtgctgttaggtacttcatagattggaagagtgatggggacagctactttacaatagatggaaatgaaggaaccatcgccactaatgaattactagacagagaaagcactgcgcagtataatttctccataattgcgagtaaagttagtaaccctttattgaccagcaaagtcaatatactgattaatgtcttagatgtaaatgaatttcctccagaaatatctgtgccatatgagacagccgtgtgtgaaaatgccaagccaggacagataattcagatagtcagtgctgcagaccgagatctttcacctgctgggcaacaattctcctttagattatcacctgaggctgctatcaaaccaaattttacagttcgtgacttcagaaacaacacagcggggattgaaacccgaagaaatggatacagccgcaggcagcaagagttgtatttcctccctgttgtaatagaagacagcagctaccctgtccagagcagcacaaacacaatgactattcgagtctgtagatgtgactctgatggcaccatcctgtcttgtaatgtggaagcaatttttctacctgtaggacttagcactggggcgttgattgcaattctactatgcattgttatactcttagccatagttgtactgtatgtagcactgcgaaggcagaagaaaaaagacaccctgatgacctctaaagaagacatcagagacaacgtcatccattacgatgatgaaggaggtggggaggaagatacccaggctttcgacatcggggctctgagaaacccaaaagtgattgaggagaacaaaattcgcagggatataaaaccagactctctctgtttacctcgtcagagaccacccatggaagataacacagacataagggatttcattcatcaaaggctacaggaaaatgatgtggatccaactgccccaccatacgattcactggccacatatgcctacgaagggagtgggtccgtggcagagtccctcagctctatagactctctcaccacagaagccgaccaggactatgactatctgacagactggggaccccgctttaaagtcttggcagacatgtttggcgaagaagagagttataaccctgataaagtcacttaagggagtcgtggaggctaaaatacaaccgagaggggagatttttaaaaaagaaaaagaaacacaaatattaatagaaatctctctcacacacacacacacacacaaacacacacacacacacacacactctgggacaagattcctttgattacctggtttctagtaagttactaaattaatcatattgtcagttttggtttattctgccaacaagagatacatcctataatgtgtacttgctttgttttgttgttttgttttttcacaatcacactgagacaagctcaggcctattcaatacaatttactgacatgacaacctagaacgaagatagctatgtggcatcacggtggaagagtgttagatttttcttaattccactaaagtgcctattgaaactcttatcatttaaagtggtgtacagtacactctgctgtgatggtattgcgggattcagagataaagacataaaacaaagacaccgtctttatgtcaagaagcaatagcgacactctgactctcctcattccttttgagaacaaaagaagaacactttctgatctccaccttcttctaattcaaaaggttttctttttcttttttaaactgtatgctaaaacgtatttgtttatcctatcctttcagaaaattgaaataaatatgaaaatatcaagttcaatatgtaagtcccaaattctagaaacaatgtttgatcttaacattagttcacattaaagctgttcattaaaatgttactttcttttccaaaaaaaaaagaaagaaaaaaaagaaaaaatattcctctttataaagagaggcctcagggctcaaattacacattaaaataaatattggttttgcttaatattgtactggtgtgtggaaaattggttttaacagtcaccagattcagcttttagtcatagatgtaatttcaagttgtgtttctatgaaaattcttagaagaaaaaagtgccattcatttaagcatggaaagagaaattcattatacagtttctcagagtttcttacaatctagtgattctttgatgagcagcaaaaataaaa

SEQ ID NO: 8504 - DNA, 513 bp, Homo sapiens
atgctggaggttcgctagccgaagcggctgcatctggcgccgcgtctgccccgcgtgctcggagcggattctgcccgccgtccccggagccctcggcgccccgctgagcccgcgatcacttcctccctgtgaccaaccggcgctgcaggttagagcctggcaatgccgtttgggtgtgtgactctgggcgacaagaagaactataaccagccatcggaggtgtttgactggatcctggaccagggctactactcggagcgagacacaagcaacgtggtacggcaagtcctggaggccgtggcctatttgcactcactcaagatcgtgcacaggaatctcaagctggagaacctggtttactacaaccggctgaagaactcgaagattgtcatcagtgacttccatctggctaagctagaaaatggcctcatcaaggagccctgtgggacccccgagtatctgggcaagcagggggtggggcaggggcagggggataatggggggcagccttca

SEQ ID NO: 8505 - DNA, 572 bp, Homo sapiens
catttcacttaaaaacaaaacaaaaaaacacaaaatattctagagaaccactaaatctgtatgctgggaaggaaacagcctcaggaagggagtcagggtttgacactagcatcctgcccatctgcaaggactccctgggctggatgttcaacaagttggacatgaactatgacctcctgcttgacccttcagagatcaatgccatctacctggataagtacgagccctgtatcaagcctcttttcaactcgtgtgactccttcaaggatggcaagctttctaacaatgagtggtgctactgcttccagaagcctggaggtctcccttgccagaatgaaatgaacagaattcagaagctgagtaaggggaaaagcctgttgggggccttcatacctcggtgtaatgaggagggctattacaaagccacacagtgccacggcagcacggggcagtgctggtgtgtggacaaatatgggaatgagttggctggctccaggaaacagggtgctgtgagctgtgaagaggagcaggaaacctcaggggattttggcagtggtgggtccgtggtcctg

SEQ ID NO: 8506 - DNA, 584 bp, Homo sapiens
aagaaccaagatggtctctggggctggagtgtcagctgtagcacccctgccctcacccagctgtatgttgttacctgcagggaacccagatgatcttcaatgcagccaaggagctgggtcagctgtccaaactcaaggatcacatggtacgagaagaagccaagagcttgaccccaaagcagtgcgcggttgttgagttggccctggacaccatcaagcaatatttccacgcgggtggcgtgggcctcaagaagaccttcctggagaagagcccggacctgcaatccttgcgctatgccctgtcgctctacacgcaggccaccgacctgctaatcaagacctttgtacagacgcaatcggcccagggcttgggtgtagaagaccctgtgggtgaagtctctgtccatgttgagctgttcactcatccaggaactggggaacacaaggtcacagtgaaagtggtggctgccaatgacctcaagtggcagacttctggcatcttccggccgttcatcgaggtcaacatcattgggccccagctcagcgacaagaaacgcaagtttgcgaccaaatccaagaacaat

SEQ ID NO: 8507 - DNA, 12167 bp, Homo sapiens
cttggctgtctctgggagcagggctggggtacctgagtggggtgcatttggggtgtgtgggaaggagagggaaagaaagatggacagtgggactctcccctagcagggtctggtgttccgtaggctagagtgcccctctgctctgcgagtgctgggcgggaggggagttggtgagagctggagacccccaggaagggctggcagaagcctttccttttgggtgctgtcaggtccgcatgtcttggcgtgttgaccttcacagcttctggcgaggggaggaatgatctgatgcgggtggggagggttagaggaggcctcaggcctaaggtggtgcagggggccccctaggggctgggcagtgccaaggcataaaagccttccctggtccctggtggcatttgaaggtgcccaggtgagaggggcttggcacctcctcaccctgggagggagaagaaaccagggaacaggtaggagtgggagacaggtgaggctttggaaatctattgaggctctggagagatttgtgtagagaggaaaatgtggttctcccccagggtctcctcctgggtttttaccctctaagcaacctgtgggcatgctgggttattcctaaggactagaagagcttggatgggggagggtggttggtgcccttcggtcctcggcacccccctccgtctccaacaccagctcaccctggtatttgtcatgtcagcaggagaaggtcaccatgttgtttttctcgcccctagtccttccttcctgccccagtccaaatttgtcctcctatttgaccttaatacttaccatggctttggaccagggaactagggggatagtgagagcagggagagggaagtgtggggaaggtacaggggacctcgacagtgaagcattctggggttttcctcctgcatttcgagctccccagcccccaacatctggttagtctttaacttcctcgggttcataaccatagcagtccaggagtggtgggcatattctgtgcccgtggggacccccggttgtgtcctgttcgactcagaagacttggagaagccagaggctgttggtgggagggaagtgaggagggaggaggggctgggtggctgggcctgtgcaccccagcccctgcccatgcccatgccttgctctctttctgtcctcagtggtcccaggctgcacccatggcagaaggaggagggcagaatcatcacgaaggtgagtccccctggctgttggatggggttccctgtcctctcaggggatgggtggatggcctaattcctttttcttcagaactgtggggaggaaggggaaggggcacaggaatataaggatcaagaaagaaagagctgggcaccacgaggttcaccctcagtttcgtgaggactctccgctgttcaggtctctgctagaagtaggacttgttgcctttttcttctgctctttccagtaaaattttatttggagaaggagtcgtgcgcacagagcaggaagacagtgttcagggatcctaggtgttgggggaagtgtcccttgtttcccctagctcccaggggagagtggacatttagtgtcatttcctatatagacatgtcccatttgtgggaactgtgacccttcctgtgtgagctggaggcacagagggctcagcctaatgggatctctcctcccttccctggtttgcattcctttgggggtggagaaaaccccatttgactatgttcgggtgctgtgaacttccctcccaggccagcagagggctggctgtagctcccaggcgccccgcccccctgcccaaccccgagtccgcctgccttttgttccgttgtggtttggatcctcccatttctctggggacaccctggctctccccaccactgactgtggcctgtgctctccacctctggggagggaaggccctggggtcttccttcccgcgagtttccctgacctaaatctggcgtggctgggtagtggccagcagtggtgatgcccagcctgttctgcctcctccttccccaccccaggagccctttccttggcctaggacctggcttctcagccactgaccggccccctgcttccagtgcgccacttaccccttccagcttcccagtggtctctggtctgggagaggcaggacaaaggtctttgtttgctggagaaaaggttgtctgcgataaataaggaaaaccacgaaagcctggttgttggagtgtacgtgtgtgctcccccaggcagtggaggccagccctccttggaggggcggctgcctgatgaaggatgcgggtgaggttccccgcctccacctcccatgggacttggggattcattccaaggggaagctttttgggggaattcctaccccaggtctttttaccctcagttaccaaccccttgcccaggccagaccttcctgctatcccctcctgggccacaagcctggccctcctctgtcccaattgtgatgaaggggcagttcaaaacttcttgattagtcatcttctcccctatcgacttggctttaaaaaatgaccttttcagacttctagtctcgttcactctttttgatgatgctttgccgtaacccttcgtgggtagagaaggattctgtgcccattggtggtctggataaaagaaatagagacctcacaggaagcagtggactggcctgtttccccactgttctttctgttttcacacctgtggccttctccccaccttcttcccaatcaacctattgtgtacatagcccccctcattgtcctttattcttctggaaagcagaccttggagggaggagtgagggggaggctcagctgtggtctctggggggtgggggttgggagctggggtggaagtccacgaagcatacacttaagatgctttggtgaagttctaaacttcatattacccaggctgaaaaaagagcacttgttcctagggctggaaatggaagccaaaacaccacctttttcagcctgtttcagcatctttagagatcagcccaacccacttacacagttgagcagagttggaggcctagagaggggagggactggcccaaggtcataccaactcatggccagagcctgggcctcctcactggccaggtgttatttcttccctctgggtagggaacctatttcagggacaggattgctatgtggtagtggtggtggggtgcgataggcgtggcaggctgggccacaatttggagtagtcatgccagagtcctgcatttatttattctcaagggccccgcctctgtggcccagaattaccccttcatgctccagtgcaccccaggcttcgtggccagcctgggaaactgtctctaccctggtctcccttcagatcagcttctagaaatgtttcgtggctacagtggcagcactgttttttccatgatgcaagcagtttgccctcttgggcggggttatcagtggctggcagggctggcacagcgtgtccgcccactgccacctgtgggttccaggagggcccagcccctgtgctgatgcccaccaccttctcagctcatgtctggggaagaggactggcagggggaaaggtgcctcctcctgaaaggtgcctcctctgtttttgcctaatataggcttgggaacactttgatgtcagctaattctgactcctttacttactagctgtgcggccttggggcaacttacttagcctctttgagcctcctgttccccatctgtaaaatggaatctcaatagtgtctaatagtaccatgtggagaaacttgtgtgaaatgatagctgtggactactgtacacagtactcaggatgtagtaagtgctcaataaacagctgttggtatggttgacgttatggtagtggttgtggggaggacgtaggaaactggagactagcttggcaaagctggctcttcctccttttagggaaagcttagagcatccccatggggtatacccatactcagactgtcctctggcatcgaggttggcccaggattcagttcagctgtcacagtgaggtggcgggatcagatgtggcaggccatgtcccttggaacttgagtacatcgtgtgatctctggaatgaaaacaggccttcaccagtgttgatggtggaaagcttagggaagtgcttcaaacacagtaggagggacttacgttagattttggaaggacttgcctgattcggaagctccaaagagtggcattacagagctgggtggagagaggggctagccatcttttgtgtcgcccaccgggctcatgtgtcatcgcctctcatgcagtggtgaagttcatggatgtctatcagcgcagctactgccatccaatcgagaccctggtggacatcttccaggagtaccctgatgagatcgagtacatcttcaagccatcctgtgtgcccctgatgcgatgcgggggctgctgcaatgacgagggcctggagtgtgtgcccactgaggagtccaacatcaccatgcagattatgcggatcaaacctcaccaaggccagcacataggagagatgagcttcctacagcacaacaaatgtgaatgcagaccaaagaaagatagagcaagacaagaaaagtaagtggccctgactttagcacttctccctctccatggccggttgtcttggtttggggctcttggctacctctgttgggggctcccatagcctccctgggtcagggacttggtcttgtgggggacttgtggtggcagcaacaatgggatggagccaactccaggatgatggctctagggctagtgagaaaacatagccaggagcctggcacttcctttggaagggacaatgccttctgggtctccagatcattcctgaccaggacttgctgtttcggtgtgtcagggggcactgtggacactggctcactggcttgctctaggacacccacagtggggagagggagtgggtggcagagaggccagcttttgtgtgtcagaggaaatggcctcttttggtggctgctgtgacggtgcagttggatgcgaggccggctggagggtggtttctcagtgcatgccctcctgtaggcggcaggcggcagacacacagccctcttggccagggagaaaaagttgaatgttggtcattttcagaggcttgtgagtgctccgtgttaaggggcaggtaggatggggtgggggacaaggtctggcggcagtaacccttcaagacagggtgggcggctggcatcagcaagagcttgcagggaaagagagactgagagagagcacctgtgccctgccctttcccccacaccatcttgtctgcctccagtgctgtgcggacattgaagcccccaccaggcctcaaccccttgcctcttccctcagctcccagcttccagagcgaggggatgcggaaaccttccttccaccctttggtgctttctcctaagggggacagacttgccctctctggtcccttctccccctcctttcttccctgtgacagacatcctgaggtgtgttctcttgggcttggcaggcatggagagctctggttctcttgaaggggacaggctacagcctgccccccttcctgtttccccaaatgactgctctgccatggggagagtagggggctcgcctgggctcggaagagtgtctggtgagatggtgtagcaggctttgacaggctggggagagaactccctgccaagtaccgcccaagcctctcctccccagacctccttaactcccaccccatcctgctgcctgcccagggctccaggacacccagccctgcctcccagtccaggtcgtgctgagcaggctggtgttgctcttggttccgtgccagctcccaaggtagccgcttcccccacaccgggattcccagaggttctgtcgcagttgcaaatgaaggcacaaggcctgatacacagccctccctcccactcctgctccccatccaggcaggtctctgaccttctccccaaagtctggcctaccttttatcacccccggaccttcagggtcagacttggacagggctgctgggcaaagagccttccctcaggctttgccccctgccggggactgggagccactgtgagtgtggagacctttgggtcctgtgccctccacccagtctcggcttcccaccaaagccttgtcaggggctgggtttgccatcccatggtgggcagcgtgaggagaagaaagagccatcgagtgcttgctgcccagacacgcctgtgtgcgcccgcgcatgcctccccagagaccacctgcctcctgacacttcctccgggaagcggccctgtgtggctttgctttggtcgttcccccatccctgcccaccttaccacttcttttactccccccaccgcccccgctctctctctgtctctgtttttttattttccagaaaatcagttcgaggaaagggaaaggggcaaaaacgaaagcgcaagaaatcccggtataagtcctggagcgtgtacgttggtgcccgctgctgtctaatgccctggagcctccctggcccccagtacaacctccgcctgccattccctgtaaccctgcctccctcccctggtccttccctggctctcatcctcctggcccgtgtctctctctcactctctcactccactaattggcaccaacgggtagatttggtggtggcattgctggtccagggttggggtgaatgggggtgccgacttggcctggaggattaagggaggggaccctggcttggctgggcaccgattttctctcacccactgggcactggtggcgggcccatgttggcacaggtgcctgctcacccaactggtttccattgctctaggcttctgcactcgtctggaagctgagggtggtggggagggcagacatggcccaagaagggctgtgaatgactggaggcagcttgctgaatgactccttggctgaaggaggagcttgggtgggatcagacaccatgtggcggcctcccttcatctggtggaagtgccctggctcctcacggaggtggggcctctggaggggagccccctattccggcccaacccatggcacccacagaggcctccttgcagggcagcctcttcctctgggtcggaggctgtggtgggccctgccctgggccctctggccaccagcggcctggcctggggacaccgcctccgggcttagcctcccatcacaccctactttagcccaccttggtggaagggcctggacatgagccttgcacggggagaaggtggcccctgattgccatccccagcaggtgaagagtcaaggcgtgctccgatgggggcaacagcagttgggtccctgtggcctgagactcacccttgtctcccagagacacagcattgccccttatggcagcctctccctgcactctctgcccgtctgtgcccgcctcttcctgcggcaggtgtcctagccagtgctgcctctttccgccgctctctctgtcttttgctgtagcgctcggatccttccagggcctgggggctgaccggctgggtgggggtgcagctgcggacatgttagggggtgttgcatggtgattttttttctctctctctgctgatgctctagcttagatgtctttccttttgcctttttgcagtccctgtgggccttgctcagagcggagaaagcatttgtttgtacaagatccgcagacgtgtaaatgttcctgcaaaaacacagactcgcgttgcaaggcgaggcagcttgagttaaacgaacgtacttgcaggttggttcccagagggcaagcaagtcagagaggggcatcacacagagatggggagagagagagagaaagagagtgagcgagcgagcgagcgggagagcgcctgagaggggccagctgcttgctcagtttctagctgcctgcctggtgactgctgccttctctgcttttaaggcccctgtggtgggctgcaggcactggtccagcctggcggggcctgttccgaggttgccctggttgcctgagtggtaggctggtgtggcttagtgtagtggtgtggacgcaagctgtgtgttgtgtcctgtggtccttctgctcatagtggctgttggtcctgatgttattactacctctggtagtaatgctgagaagctgaaagccgattccaggtgtggacaatgtcaacaaagcacagatgctctcgctggggccttgcctcggccctttgaagtctgcatggctgggcttctcactcactcagtgtttcttgctgggggaaggaattgagtctcccacttcagactgggcctccctgaggaaagggttgtgtctccccactcagactgaggttccctgagggtagggctgtgtctctcccctccgacctgggctccctgatagggctgtctccccgctcagactgaggctccctcaggccagggctatgtctccctcctcagactggggctctgagggcaaggggtctggctgttcgtttaggatggggcacttttgcctacacactgaaggagctgtagcatccaagaatactagatacctttaatcctccaccagtcatggtgacaaccccaagcagcccacacattttcaagtgcccccaggatgcgtggagggaggggtctgtgcccattctcctgacattagcctgtgagctccgtaagcccgggcctcgtttacgtacctttgtgagccccgggcatctgtacctctttcctttgcccatactggggaccaaggaagtgtcaagtgcatgagtgaatgtgtgactcagttcagagggtgaggtcaggagcacagggtcgggacaggtggctggcatcttttaatgccttagcttatgttctttataccaacttggcctgtgctcagagtgagggaggccctgggggtcagggtaagcgtcagtcagggaggcaagactttgtggggatttcctagacagggccaaggcacccccagctcaccccgaggctgtgttagggaagtccttggagtgtctcccctcccccagcaatgttcttgtggcttgtgtgtgctcaggggatgctgggaaccaggcctgggtagttggtgtggggtgctgtctgtcttggccctatgtgaaaccaagagggcgtatattagtgctggggtgggggctctgcctaacttcagggctggatgaggggagtctcagttccccaggggtccttgggaaagataagggacttgacattttagggtttttaggtgattattctgctgatgggggtttgtgtgaagtgacctgggagctaactgaagttactctaacctcccaatacctttacccaacccccaagctggctgtatctgggaatatcagtttccaaaattggaggcttaggactccgtttcggggctccccagaagggtagggcctgttctgcctccttctcacaatcacccaggggcaggggcatgctgagaaagttcttggaggccccctttgcttcagctggagtagtgaagccgccgaattgtctctccccatcctaagtgaagcagcatatttgaaaggaaagacaacctgttacctgggcctgcaacctccaggcagctcaagagagatgaggcctacagccacagtgggaggggacatggggaatggagatggtccctcaccttcctggggcctcctgctctacgctaccccctcgggagcctcctgtccccagggcaggcccttgccattgttggtcacccggccaagcctctctgcctcaggcgttctcccagaagatctgcccactctcttccccacaccagcccctagagactgaactgaaaaccctcctcagcagggagcctcttctgattaacttcatccagctctggtcacccatcagctcttaaaatgtcaagtggggactgttctttggtatccgttcatttgttgctttgtaaagtgttcccatgtccttgtcttgtctcaagtagattgcaagctcaggagggtagactgggagcccctgagtggagctgctgctcaggccggggctccctgagggcagggctggggctgttctcatactggggctttctgccccaggaccacaccttcctgtcctctctgctcttatggtgccggaggctgcagtgacccaggggcccccaggaatggggaggccgcctgcctcatcgccaggcctcctcacttggccctaaccccagcctttgttttccatttccctcagatgtgacaagccgaggcggtgagccgggcaggaggaaggagcctccctcagggtttcgggaaccagatctctcaccaggaaagactgatacagaacgatcgatacagaaaccacgctgccgccaccacaccatcaccatcgacagaacagtccttaatccagaaacctgaaatgaaggaagaggagactctgcgcagagcactttgggtccggagggcgagactccggcggaagcattcccgggcgggtgacccagcacggtccctcttggaattggattcgccattttatttttcttgctgctaaatcaccgagcccggaagattagagagttttatttctgggattcctgtagacacacccacccacatacatacatttatatatatatatattatatatatataaaaataaatatctctattttatatatataaaatatatatattctttttttaaattaacagtgctaatgttattggtgtcttcactggatgtatttgactgctgtggacttgagttgggaggggaatgttcccactcagatcctgacagggaagaggaggagatgagagactctggcatgatcttttttttgtcccacttggtggggccagggtcctctcccctgcccaggaatgtgcaaggccagggcatgggggcaaatatgacccagttttgggaacaccgacaaacccagccctggcgctgagcctctctaccccaggtcagacggacagaaagacagatcacaggtacagggatgaggacaccggctctgaccaggagtttggggagcttcaggacattgctgtgctttggggattccctccacatgctgcacgcgcatctcgcccccaggggcactgcctggaagattcaggagcctgggcggccttcgcttactctcacctgcttctgagttgcccaggagaccactggcagatgtcccggcgaagagaagagacacattgttggaagaagcagcccatgacagctccccttcctgggactcgccctcatcctcttcctgctccccttcctggggtgcagcctaaaaggacctatgtcctcacaccattgaaaccactagttctgtccccccaggagacctggttgtgtgtgtgtgagtggttgaccttcctccatcccctggtccttcccttcccttcccgaggcacagagagacagggcaggatccacgtgcccattgtggaggcagagaaaagagaaagtgttttatatacggtacttatttaatatccctttttaattagaaattaaaacagttaatttaattaaagagtagggttttttttcagtattcttggttaatatttaatttcaactatttatgagatgtatcttttgctctctcttgctctcttatttgtaccggtttttgtatataaaattcatgtttccaatctctctctccctgatcggtgacagtcactagcttatcttgaacagatatttaattttgctaacactcagctctgccctccccgatcccctggctccccagcacacattcctttgaaataaggtttcaatatacatctacatactatatatatatttggcaacttgtatttgtgtgtatatatatatatatatgtttatgtatatatgtgattctgataaaatagacattgctattctgttttttatatgtaaaaacaaaacaagaaaaaatagagaattctacatactaaatctctctccttttttaattttaatatttgttatcatttatttattggtgctactgtttatccgtaataattgtggggaaaagatattaacatcacgtctttgtctctagtgcagtttttcgagatattccgtagtacatatttatttttaaacaacgacaaagaaatacagatatatcttaaaaaaaaaaaagcattttgtattaaagaatttaattctgatctc

SEQ ID NO: 8508 - DNA, 1749 bp, Homo sapiens; identical to SEQ ID NO: 7390

SEQ ID NO: 8509 - DNA, 696 bp, Homo sapiens; identical to SEQ ID NO: 7155

SEQ ID NO: 8510 - DNA, 559 bp, Homo sapiens
gacaaggtctcacagtgttgctcagctggtctcaaattcctggagtccagtgatcctcccacctcagcccctgaaagtgctgattataggcacaagctaccatgcccagcctgacctattttttacctttgtgccatttcttaaattttgaataggttgatattatcactgatatccttagcagtttatgttttgctgtagcagtctctcttcagaaacaaaaattgttgtaataactttatgcttcacagtatgttgaagcacctttcctttgtccccacagcaaaccctcctggggcttgcccatagatgctgttcagtgggatatctgcaatctgccattgagaactggctctgtggatattattgtaacagatttgccatttggaaaaaggatgggatccaagaagagaaactggaacctttatccagcttgcctacgggagatgagccgtgtctgcacacctaccacaggccgagctgtactacttactcaagacacaaaatgctttaccaaggtgctatacacattagctcaaaatcgcagcctgtggcaact

SEQ ID NO: 8511 - DNA, 4758 bp, Homo sapiens
atgtggccatcgcagctactaattttcatgatgctcttagctccaataattcatgctttcagccgtgccccaattccaatggctgtggtccgcagagagctatcctgtgagagctatcctatagagcttcgctgtccaggaacagacgtcatcatgatagaaagtgccaactatggcaggactgatgacaaaatttgtgactctgaccctgctcagatggagaatatccgatgttatctgccagatgcctataagattatgtctcaaagatgcaataacagaacccagtgtgcagtggtggcaggtcctgatgtttttccagacccgtgtccaggaacctataaataccttgaagtgcagtatgaatgtgtcccttacaaagtggaacaaaaagtttttctttgtcctggactactaaaaggagtataccagagtgaacatttgtttgagtccgaccaccaatctggggcgtggtgcaaagaccctctgcaggcatctgacaagatttattatatgccctggactccctacagaactgataccctgactgagtattcatccaaggatgacttcattgctggaagaccaactacaacctacaagctccctcacagggtggatggcacaggatttgtagtgtatgatggagctttgttcttcaacaaagagcgcaccaggaacatagtaaagtttgatttgcggactaggataaagagtggagaggctatcatagcaaatgccaattaccatgatacctccccttaccgatggggaggcaaatctgacatagacctggcagtagatgagaatgggctatgggtaatctatgcaacagaacaaaacaatggtaaaattgtcattagtcaattgaacccttacaccctacggatcgaaggaacatgggatactgcatatgataaaaggtcagcttccaatgcctttatgatttgtggaattctgtatgtggtcaaatctgtatatgaggatgatgacaatgaggctactggaaataagattgactacatttacaacactgaccaaagcaaggatagtttggtggatgtaccctttcctaattcataccagtacattgcagctgtggattacaaccccagggacaacctactttatgtatggaataactatcacgtcgtgaaatattctttggattttggacctctggatagtagatcagggcaggcacatcatggacaagtttcatacatttctccgccaattcaccttgactctgagctagaaagaccctctgttaaagatatctctaccacaggacctcttggcatgggaagcactaccaccagtaccacccttcggaccacaactttgagcccaggaaggagtaccaccccgtcagtgtcaggaagaagaaaccggagtactagtaccccatctccagctgtcgaggtacttgatgacatgaccacacaccttccatcagcatcgtcccaaatcccagctctcgaagagagctgtgaggctgtggaagcccgagaaatcatgtggtttaagactcgtcaaggacagatagcaaagcagccatgccctgcaggaactataggtgtatcaacttatctatgccttgctcctgatggaatttgggatccccaaggtccagatctcagcaactgttcttctccttgggtcaatcatataacacagaagttgaaatctggtgaaacagctgccaacattgctagagagctggctgaacagacaagaaatcacttgaatgctggggacatcacctactctgtccgggccatggaccagctggtaggcctcctagatgtacagcttcggaacttgaccccaggtggaaaagatagtgctgcccggagtttgaacaagcttcagaaaagagagcgctcttgcagagcctatgtccaggcaatggtcgagacagttaacaacctccttcagccacaagctttgaatgcatggagagacctgactacgagtgatcagctgcgtgcggccaccatgttgcttcatactgtggaggaaagtgcttttgtgctggctgataaccttttgaagactgacattgtcagggagaatacagacaatattaaattggaagttgcaagactgagcacagaaggaaacttagaagacctaaaatttccagaaaacatgggccatggaagcactatccagctgtctgcaaataccttaaagcaaaatggccgaaatggagagatcagagtggcctttgtcctgtataacaacttgggtccttatttatccacggagaatgccagtatgaagttgggaacggaagctttgtccacaaatcattctgttattgtcaattcccctgttattacggcagcaataaacaaagagttcagtaacaaggtttatttggctgatcctgtggtatttactgttaaacatatcaagcagtcagaggaaaatttcaaccctaactgttcattttggagctactccaagcgtacaatgacaggttattggtcaacacaaggctgtcggctcctgacaacaaataagacacatactacatgctcttgtaaccacctaacaaattttgcagtactgatggcacatgtggaagttaagcacagtgatgcggtccatgacctccttctggatgtgatcacgtgggttggaattttgctgtcccttgtttgtctcctgatttgcatcttcacattttgctttttccgggggctccagagtgaccgtaacaccatccacaagaacctctgcatcagtctctttgtagcagagctgctcttcctgattgggatcaaccgaactgaccaaccaattgcctgtgctgttttcgctgccctgttacatttcttcttcttggctgccttcacctggatgttcctggagggggtgcagctttatatcatgctggtggaggtttttgagagtgaacattcacgtaggaaatacttttatctggtcggctatgggatgcctgcactcattgtggctgtgtcagctgcagtagactacaggagttatggaacagataaagtatgttggctccgacttgacacctacttcatttggagttttataggaccagcaactttgataattatgcttaatgtaatcttccttgggattgctttatataaaatgtttcatcatactgctatactgaaacctgaatcaggctgtcttgataacatcaactatgaggataacagacccttcatcaagtcatgggttataggtgcaatagctcttctctgcctattaggattgacctgggcctttggactcatgtatattaatgaaagcacagtcatcatggcctatctcttcaccattttcaattctctacagggaatgtttatatttattttccattgtgtcctacagaagaaggtacgaaaagagtatgggaaatgcctgcgaacacattgctgtagtggcaaaagtacagagagttccattggttcagggaaaacatctggttctcgaactcctggacgctactccacaggctcacagagccgaatccgtagaatgtggaatgacacggttcgaaagcagtcagagtcttcctttattactggagacataaacagttcagcgtcactcaacagaggagccatggctaatcatcttataagcaatgctctgcttcgtccgcatggtactaacaatccctataatacattgcttggggaaccggcggtctgtaacaacccttctgtcagcatgtacaacgcacaagaggggcttctgaacaatgccagggatacaagtgtcatggatactctaccactgaatggtaaccatggcaatagttacagcattgccagcggcgaatacctgagcaactgtgtgcaaatcatagaccgtggctataaccataacgagaccgccctagagaaaaagattctgaaggaactcacttccaactatatcccttcttacctgaacaaccatgagcgctccagtgaacagaacaggaatctgatgaacaagctggtgaataaccttggcagtggaagggaagatgatgccattgtcctggatgatgccacctcgtttaaccacgaggagagtttgggcctggaactcattcatgaggaatctgatgctcctttgctgcccccaagagtatactccaccgagaaccaccagccacaccattataccagaaggcggatcccccaagaccacagtgagagctttttccctttgctaaccaacgagcacacagaagatctccagtcaccccatagagactctctctataccagcatgccgacactggctggtgtggccgccacagagagtgttaccaccagcacccagaccgaacccccaccggccaaatgtggtgatgccgaagatgtttactacaaaagcatgccaaacctaggctccagaaaccacgtccatcagctgcatacttactaccagctaggtcgcggcagcagtgatggatttatagttcctccaaacaaagatgggacccctcccgagggaagttcaaaaggaccggctcatttggtcactagtctatagaagatgacacagaaattggaaccaacaaaactgctaacaccttgttgactgttctgagttgatataagcagtggtaataatgtgtgtactcctaaatctttatgctgtcctctaaagacaaacacaaactctcagacttttttttttttaatgggatttttaggtcagcccaggggagaaagataactgctaaaattcccctgtaccccatcctttctt

SEQ ID NO: 8512 - DNA, 729 bp, Homo sapiens
cctctctccacgaggctgccggcttaggacccccagctccgacatgtcgccctctggtcgcctgtgtcttctcaccatcgttggcctgattctccccaccagaggttggaacagactgtgggggcggagacaggagcagggagcccaagaaggaggctgctgggatgtccaggctggagggtacagaggcaggaccaggatgggggcagtggagttatccagcactgaccacatggacagacgttgaaagataccacgtccagttcttcagcagactcaactatcatggacattcaggtcccgacacgagccccagatgcagtctacacagaactccagcccacctctccaaccccaacctggcctgctgatgaaacaccacaaccccagacccagacccagcaactggaaggaacggatgggcctctagtgacagatccagagacacacaagagcaccaaagcagctcatcccactgatgacaccacgacgctctctgagagaccatccccaagcacagacgtccagacagacccccagaccctcaagccatctggttttcatgaggatgaccccttcttctatgatgaacacaccctccggaaacgggggctgttggtcgcagctgtgctgttcatcacaggcatcatcatcctcaccagtggcaagtgcaggcagctgtcccggttatgccggaatcgttgcaggtgagtccatcagaaacaggag

SEQ ID NO: 8513 - DNA, 331 bp, Homo sapiens
ggccgagaacggcccttgctgccaccaacatggagactttgtaccgtgtcccgttcttagtgctcgaatgtcccaacctgaagctgaagaagccgccctggttgcacatgccgtcggccatgactgtgtatgctctggtggtggtgtcttacttcctcatcaccggagagtaaatggacaatatattatggaaggacttgcatccagcttcctatttacaatgggaggtttaggtttcataatcctggaccgatcgaatgcaccaaatatcccaaaactcaatagattccttcttctgttcattggattcgtctgtgtcctattgagtttt

SEQ ID NO: 8514 - DNA, 1593 bp, Homo sapiens; identical to SEQ ID NO: 7776

SEQ ID NO: 8515 - DNA, 5418 bp, Homo sapiens
ggacaaggagagagtgcggctgctgagagccgagcccagcaatcccgatcctctgagtcgtgaagaagggaggcagcgagggggttggggttggggcctgaggcaagcccccaggctccgctcttgccagagggacaggagccatggctcagaaaatggactgtggtgcgggcctcctcggcttccaggctgaggcctccgtagaagacagcgccttgcttatgcagaccttgatggaggccatccagatctcagaggctccacctactaaccaggccaccgcagctgctagtccccagagttcacagcccccaactgccaatgagatggctgacattcaggtttcagcagctgccgctaggcctaagtcagcctttaaagtccagaatgccaccacaaaaggcccaaatggtgtctatgatttctctcaggctcataatgccaaggatgtgcccaacacgcagcccaaggcagcctttaagtcccaaaatgctaccccaaagggtccaaatgctgcctatgatttttcccaggcagcaaccactggtgagttagctgctaacaagtctgagatggccttcaaggcccagaatgccactactaaagtgggcccaaatgccacctacaatttctctcagtctctcaatgccaatgacctggccaacagcaggcctaagacccctttcaaggcttggaatgataccactaaggccccaacagctgatacccagacccagaatgtaaatcaggccaaaatggccacttcccaggctgacatagagaccgacccaggtatctctgaacctgacggtgcaactgcacagacatcagcagatggttcccaggctcagaatctggagtcccggacaataattcggggcaagaggacccgcaagattaataacttgaatgttgaagagaacagcagtggggatcagaggcgggccccactggctgcagggacctggaggtctgcaccagttccagtgaccactcagaacccacctggcgcaccccccaatgtgctctggcagacgccattggcttggcagaacccctcaggctggcaaaaccagacagccaggcagaccccaccagcacgtcagagccctccagctaggcagaccccaccagcctggcagaacccagtcgcttggcagaacccagtgatttggccaaacccagtaatctggcagaacccagtgatctggccaaaccccattgtctggcccggccctgttgtctggccgaatccactggcctggcagaatccacctggatggcagactccacctggatggcagaccccaccgggctggcagggtcctccagactggcaaggtcctcctgactggccgctaccacccgactggccactgccacctgattggccacttcccactgactggccactaccacctgactggatccccgctgattggccaattccacctgactggcagaacctgcgcccctcgcctaacctgcgcccttctcccaactcgcgtgcctcacagaacccaggtgctgcacagccccgagatgtggcccttcttcaggaaagagtaagagctgtaactccccagtcacttttcccctctcttgctcttttctttgtcatcctctcatctgtaattcaaccaagtttttttgtaaatattttataagtttaatgatttcctttttccctcccaggcaaataagttggtcaagtacttgatgcttaaggactacacaaaggtgcccatcaagcgctcaggtatgcatccagtgtcccctccccaagctctgcccttcccttcactccatgctctgtcagcattcttctgcttgtagctctgcccttcccttcactccatgctctgtcggcattcttctgcttgtatgacccttccccttctatcccctcctttccatggttggctctttccacccttgaggaccttgactgtgctacccccagcagggctggcaaagggactgctgctctgtggcccccgctcggctcagatggctccctcctctctcctacagaaatgctgagagatatcatccgtgaatacactgatgtttatccagaaatcattgaacgtgcatgctttgtcctagagaagaaatttgggattcaactgaaagaaattgacaaagaagaacacctgtatattctcatcagtacccccgagtccctggctggcatactgggaacgtaagatgggaaagaaggtggaacatggcctttctcagtggtgctttttttctaggagtttcacgtagatcagggtccagggttcagggtcacatagcaggtcatgggcagagctggggtataattctcccctagctgaggaatattggggaggctagatgggcaagctggttggggtctctcatgcaaatggctactgaaaatatattctttctatattcccttaggaccaaagacacacccaagctcggtctcctcttggtgattctgggtgtcatcttcatgaatggcaaccgtgccagtgagggtgagtggctggacctgcagctgggggttggccacagcctgatttccatgcttattttccgtcccttgtctccccttgcctcccattgcagctgtcctctgggaggcactacgcaagatgggactgcgtcctgggtatgattgggctctctcatctcttgcctgtttgtgccatcctttggcaacagtggatggtcccaggattgcattaacctgggggtctggagggtttggtttggggatgttcagagcccaaagatgtgacctgggtggatggggaaacagttctgaactctctgcctcttttctcatctctgacctctgttctggaaagctctttgggcatggtaatagcctctgattgtgggtttcctttttttaccttcagggtgagacatcccctccttggagatctaaggaaacttctcacctatgagtttgtaaagcagaagtaagtgatgcctaaggggcttttcctgcttcttatgattctgcctgtgtgctggtcagctttagaaagcccttcctggctggatacaatggctcatgcctgtaatcccagtactttgggaggctcaggtgggcagatcgcttgagcccaggagttcaagaccagcctgggcaacataacgaaaccccatctctacaaaaaaatacaaaaattagccaggcgtggtgacatgcacctgtagtcccagctacttgggaggctgaggtaggggagaatcatctgagcccaggaagttgaggctgcagtgagctgtgatcatgccactgcactccaacctgggcaacagagtgagaccctgtctcaaaaaaaataaaagaaagcccttctcaagctcgtttcttacactatacttgtgcatatgtgtttctgtgcatacagaaacacttatgtcctcaggagtatttattgcatatactcctcatggttaaattctttattttttatttttttattttttgagacggagtttcgctcttgttgcccaggctggagtgcaatggcgtgatctcggctcaccgcaacctctgcctcctgggttcaagctattctcctgcctcagcctcttgagtagctgggattacaggcatgtgccaccacgcccacctaattttgtcttcttagtagagacggtgtttctccatgttaggctggtctcaaactcccgacttcaggtgatctgcctgccttggcctccagaagtgctgagattacaggcgtgagcgaccgtaccgggcgaattcttttgtttgtttttttcgagactgagtctcactctgttgcccatgctggagtgcagtggtgcaatcttggctcgcttgaacttccacctcccaggttcaagcaattcttgtgcctcagcctcccgagtaactggaacttcaggtgcgtgccaccgtgcccggctgtttttgtatttttagtagagatggggcttcaccacgttggccaggctggtctcaaactcctgacctgaagcaatccacccacctctgcctcccaaagtgctgggattacaggtgtgagccaccacacccggccagaatttttctaatttttctacttttctaagcagttgtcttgcaagtgaagcccatccaccatccccacagtagacattcccaaggctgggccaggctgacacttttgcactgcattgtactcatttcaatggacctctgtggctcactgacaagattacaagaatctggagctagagctcaggcagaaggagtgaaaggaaatgttgtcctttctgtgaccctatacaagcctcgcctgcatctctagtgagtgcttagcgttctagtgcaggaatttaaggcttgatgattaaggggtaaataccctgatggtgttcaggaatgagcccaagggggagttgctatctgaaatctgttaaaaaatgtaagattatttttcattagtggactaccattctgcctgggtaggtagacacaaagactgttttgctctttcagatacctggactacagacgagtgcccaacagcaaccccccggagtatgagttcctctggggcctccgttcctaccatgagactagcaagatgaaagtgctgagattcattgcagaggttcagaaaagagaccctcgtgactggactgcacagttcatggaggctgcagatgaggccttggatgctctggatgctgctgcagctgaggccgaagcccgggctgaagcaagaacccgcatgggaattggagatgaggctgtgtctgggccctggagctgggatgacattgagtttgagctgctgacctgggatgaggaaggagattttggagatccctggtccagaattccatttaccttctgggccagataccaccagaatgcccgctccagattccctcagacctttgccggtcccattattggtcctggtggtacagccagtgccaacttcgctgccaactttggtgccattggtttcttctgggttgagtgagatgttgggtaggtacatcactttggattgggcagttagggtctctgggggatatagggtccatggggttgtatttatgtgcatgagctagaagtattaggaaactcattgtagggagatgaggaaagtatggggcagcactctttggtatgtatattccttattatttgatatatatcattgatttttttacttcttctttcttatgttcacagatattgctatcaatcgcagtagtctttcccctgtgtgaggctgaagcctcagattccttctaaacacagctatctagagagccacatcctgttgactgaaagtggcatgcaagataaatttatttgctgttccttgtctactgctttttttccccttgtgtgctgtcaagttttggtatcagaaataaacattgaaattgcaaagtgaa

SEQ ID NO: 8516 - DNA, 535 bp, Homo sapiens
ctcatatactcataaccttccccctaccctcaggtgtgggttttgctaccaggcaggtggccagcatgaccaagcctaccacaatcatcgaaaagaatggggacattctcaccctaaaaacacacagcaccttcaagaacacagagatcagctttaagttgggggtggagttcgatgagacaacagcagatgacaggaaggtcaagtccattgtgacactggatggagggaaacttgttcacctgcagaaatgggacgggcaagagaccacacttgtgcgggagctaattgatggaaaactcatcctgacactcacccacggcactgcagtttgcactcgcacttatgagaaagaggcatgacctgactgcactgttgctgactactactctgccaatcggctacccctcgactcagcaccacattgcctcatttcttcctctgcattttgtacaaatccacgaattcttctggggtcaggtgccactgaccgggatccagttccagttcccatggtgtatgtggtttttttttt

SEQ ID NO: 8517 - DNA, 578 bp, Homo sapiens
tgctggctattttaggaaacttggtgatcagtatttctctaaatattcagaaatattctcaccttcagctggcacaacaagagcacccaaggccatacttcaagagtgtgctgtggtggggtggtgtcctgctgatggccgtgggagagacggggaactttgcagcctatggatttgctcccattactctgatcgctccgttaggctgtgtgtctgttacaggtagtgccattatttctgttacatttctgaaagacaatttgagagcctcagacttactcggtacgacactggcatttgcaggaacatatttactggtgaactttgctccaaatataactcaggcaatctcagcaagaacagtacagtattaccttgtcggatggcagttcctgatctatgtgaaaagaaaggaaggaagatttgagaagcccagtgtataccagccagagaagaataaagtgcactcactaaaacagcctttcccagcctgtctgctgcagatgggcaatccccatccttgccaaaatgcaaagaggagtggagttttcaaggtcaaactaggtgagaaagattct

SEQ ID NO: 8518 - DNA, 564 bp, Homo sapiens
accagcagttcctgtcctgccatgaccccatcaacatccagttcacctcggagagcgcctgaaactgcatgagaagacaccagagcagttgcggatgatcctgcccaaccccctgtaccattgcctgggttccgtggcaggcacaatgatgtgtctgatgtacggtgccaccctcatcctggcctctcccatcttcaatggcaagaaggcactggaggccatcagcagagagagaggcaccttcctgtatggtacccccacgatgttcgtggacattctgaaccagccagacttctccagttatgacatctcgaccatgtgtggaggtgtcattgctgggtcccctgcacctccagagttgatccgagccatcatcaacaagataaatatgaaggacctggtggttgcttatggaaccacagagaacagtcccgtgacattcgcgcacttccctgaggacactgtggagcagaaggcagaaagcgtgggcagaattatgcctcacacggaggtgagcccctgaccaagactccaaagtcccacctcccgtcacccagctggggt

SEQ ID NO: 8519 - DNA, 1047 bp, Homo sapiens
caggagcatgacgagggagagaggtcatcgaggctggggtgagacatctgacttaccgtcaggagccacgtcagtgcctcataaaatccaatctccattcaggacaaccccagcaatgtggagaagcctggggcttgccctggctctctgtctcctcccatcgggaggaacagagagccaggaccaaagctccttatgtaagcaacccccagcctggagcataagagatcaagatccaatgctaaactccaatggttcagtgactgtggttgctcttcttcaagccagctgatacctgtgcatactgcaggcatctaaattagaagacctgcgagtaaaactgaagaaagaaggatattctaatatttcttatattgttgttaatcatcaaggaatctcttctcgattaaaatacacacatcttaagaataaggtttcagagcatattcctgtttatcaacaagaagaaaaccaaacagatgtctggactcttttaaatggaagcaaagatgacttcctcatatatgatagatgtggccgtcttgtatatcatcttggtttgcctttttccttcctaactttcccatatgtagaagaagccattaagattgcttactgtgaaaagaaatgtggaaactgctctctcacgactctcaaagatgaagacttttgtaaacgtgtatctttggctactgtggataaaacagttgaaactccatcgcctcattaccatcatgagcatcatcacaatcatggacatcagcaccttggcagcagtgagctttcagagaatcagcaaccaggagcaccaaatgctcctactcatcctgctcctccaggccttcatcaccaccataagcacaagggtcagcataggcagggtcacccagagaaccgagatatgccagcaagtgaagatttacaagatttacaaaagaagctctgtcgaaagagatgtataaatcaattactctgtaaattgcccacagattcagagttggctcctaggagctgatgctgccattgtcgacatctgatatttgaaaa

SEQ ID NO: 8520 - DNA, 4337 bp, Homo sapiens
agccaacgaggggaagaaaggagttggggcaaaacaggaggcgtttccctacccgcatacatccccgtccccgagacacccaatccccccacccccagcctgcccgcgcctcccgcccccagctcctcgccctggggacagctggcagccccgcgcggaccagacacaaagccgatcaatcccggaggcgtgggggcggagggacgacccgccggggctttcccgggcgctgctctcctcctgctgccccctcgctaggacccggcggacgcctcgtctggttttcacgccctctagcccctacccccacacccccaaaacagaacagacccccatccctgggctggaggacccgcctcttggcagccagctgagaaggcgccccggggagggggaaactgacatcccatctagagccgtccctcctcttcctcccctcccgactctctgctcctttcccgccccagaagttcaagggcccccggcctcctgcgctcctgccgccgggaccctcgacctcctcagagcagccggctgccgccccgggaagatggcgaggaggagccgccaccgcctcctcctgctgctgctgcgctacctggtggtcgccctgggctatcataaggcctatgggttttctgccccaaaagaccaacaagtagtcacagcagtagagtaccaagaggctattttagcctgcaaaaccccaaagaagactgtttcctccagattagagtggaagaaactgggtcggagtgtctcctttgtctactatcaacagactcttcaaggtgattttaaaaatcgagctgagatgatagatttcaatatccggatcaaaaatgtgacaagaagtgatgcggggaaatatcgttgtgaagttagtgccccatctgagcaaggccaaaacctggaagaggatacagtcactctggaagtattagtggctccagcagttccatcatgtgaagtaccctcttctgctctgagtggaactgtggtagagctacgatgtcaagacaaagaagggaatccagctcctgaatacacatggtttaaggatggcatccgtttgctagaaaatcccagacttggctcccaaagcaccaacagctcatacacaatgaatacaaaaactggaactctgcaatttaatactgtttccaaactggacactggagaatattcctgtgaagcccgcaattctgttggatatcgcaggtgtcctgggaaacgaatgcaagtagatgatctcaacataagtggcatcatagcagccgtagtagttgtggccttagtgatttccgtttgtggccttggtgtatgctatgctcagaggaaaggctacttttcaaaagaaacctccttccagaagagtaattcttcatctaaagccacgacaatgagtgaaaatgatttcaagcacacaaaatcctttataatttaaagactccactttagagatacaccaaagccaccgttgttacacaagttattaaactattataaaactctgctttgtccgacatttgcaaagaggtacacgaggaaatggaattggtatttcattttaattttcatgactactaactcacctgaacttgctattttaaacaaatagttctgtcgacacctaaaatataatctggcttcttgtgtctggactaagttaaaagaattaaaatactttgtaatgtcctgggctttgggaaatgttaaccacgtcctaacttctagagaacgttactaaaatataacatactgattgtgaagtcaatccacaggtcatgaaaatataaatcagactctgcacgagagtctgatttagggggtccaacaaatactctgacagatgcaaaaggaacctctggtctcatttctgccagaatcctcttttctcccctaatatcatccttattctgatgctcgttcatcactaacacacccacagaaaggaggaagcgggatgggtcttatgcccaaggatttgcactttgtgtttacttccattcctgggaactaaaagcaacatcaaaagaaatgcctaatggctggagcccacaggtgtgcaccacaggatttgcctggtgtgtgtcactgatttcttcattaaacgtaatttagatggtcaaacacaaacccaagtggcttatttcacccctactgctgcttgccactgcttccttcttgtaagatttctttgaagaggatcagtgactttgacatcagaactcaccactggagcctacacaagtttgcagatacctttccctgcaggagtggtgacttcacatctttctgtctctaaaaattgtgcagtgacattccgggccaagtcccttagtcaggggttgacaattctgcttttggacaaggagggatgtggagggaagaagtaatagtctaccaggaaaatgagacgaaaaagctcagtatgactccctgcatctggtacccctcttgaaacacagtgggcacatgagcaatggctcaaacgaaaagtggatctaatgtgggtttctcaaccgatgaaccacaaaagcttccagctactattacaatgtgaaaattccaatgatccgtttaccagagcaattagactatgttaaaaattcatatcatttgtaacttcttttaattactgaattgatattaaaaacaaaatatggctagggcatgtcctattcttctgggcaaatgtggatgaaaaggtcacttgctacctttgacaactatgaacatgatggttaatcttctttctttttttttttttttttttgagacggagtctcactctgtcgcccaggctggagtacagtggcacaatcttggctcactgcaacctccgcctcccctccgcctcccagattcaagcacttctcctgcctcagcctcccaagtagctgagattataggcgtgtaccaccacacctggctaatttttgtattttagtagagaagggtttcaccatgttggccaggctggtctcaaacctctgacctcaaatgatccacccccatcagcctcccaaagtgctgggattataggcatgagccactgcactgggcaggttaatcttctttcaaaagagtctgctctttctacccaattggcgaagcaaatccccaggattcaccgaacaaatggattaagcacccactgagtgcctagcatgtgcctggacaccaggccaccgggaagatgctccccctttgacttgtctatgacatgctatgtctctcaccagatcccttcctggaggtcgggcttctgtaacatggctctgcccccaaaataaaattttcaccacgagtcagggatcggcaaacattttctgtaaagagccagaaagtagatattttaagtcataaggtccctgttaacaactacttgactctgccattgtagcacaaaggcagccacagacaaaacaagcaagtagtcatgtctgtgttccaataagactttatttacaaaaacagcaggcacagacaagatttggcccacaggcatagattcccaactcatggtggtgaagtacagaaaaaaacacctgtctacaagcttttgtaagaaatcaggctaaatgttacctatgttttggttggaagatttctttggtttgaggaatgctttcctcttgcattggcatgccaagaggatagatgactctgaaagacgcctcttcagacatacctgtcatcacacaagatcaacttcttcagtttaaatgacacaaatccatattgtggaaggaaaatatgtagtgccttagcttcactaatagttgtaaaacttctttttaagacatcaaaggctagaggattcattttatgcagtgcgaacatctaataacactctctgtgtcaaatatatattgtacattaccttaaactattgtaatagctaggtaaaaatccttgtataaaagaatgttttcccccacacaaagggcagagtattgagcactaatttcctattaaaagtatatatatgtatctgtgggtcactggtgtccagacttgtatttgcatttgtgtttacttgaggaacttgaacactaacaactggtaaaatcccattgtaattcttacagcattttgactttattttcctgcagtgaattgtgttgtgtaaagattagggctttaaaatcttattagcaagctttgttttgttttaattattgttgctgttgtaactagatttaatttatttttagttggaggtttgacctaagtctggaccaattgattgcttttcaatacaactttgcaaagaacttcctttttccacaggtggctttgttcgattaaagtctacactaataaaaata

SEQ ID NO: 8521 - DNA, 432 bp, Homo sapiens
gggcagagcaacattgttttgacagtgaaaattaccaatttataattttttaagaaaagcatgcctagcacagaccacctgattaccaagaggaagctgaagaggagattctactagagagatgcaaatgaataattctggtgttactgtggggaagaaaagaagaacctgtgtgtgactcatacaagaaaatctgttattcaagaataaatatcgcagcagtaataataaaggtttcttgagtacaggcgatcaggctgcaaaggggaactatggactccttgatctcatacaagctttaagatggactagtgaaaacattggattctttggtggtgaccccttaagaatcactgtttttggatctggtgctgggggttcatgtgtcaacctgctgactttatcccattattctgaaggtaaccgttggag

SEQ ID NO: 8522 - DNA, 561 bp, Homo sapiens
ctggtaatctgtggcgtaacaagacctccaggtgattctctgtattagcagccgctctgtgctccctgattcctccagaaaagcacaaggatttaatccagatagatataaatttcacctgggatcatttatcattccacattcttctttaagaaatgtgctaaagagccacagatgggtcttgatgaaaacaaaggaaaagccatgaagtttctacagcataattagcatcatcattattctggctggagcaattgcactcatcattggctttggtatttcagggagacactccatcacagtcactactgtcgcctcagctgggaacattggggaggatggaatcctgagctgcacttttgaacctgacatcaaactttctgatatcgtgatacaatggctgaaggaaggtgttttaggcttggtccatgagttcaaagaaggcaaagatgagctgtcggagcaggatgaaatgttcagaggccggacagcagtgtttgctgatcaagtgatagttggcaatgcctctttgcggctgaaaaacgtgcaactcacagatgc

SEQ ID NO: 8523 - DNA, 612 bp, Homo sapiens
ttttctcctattaatctgctttgtcatttgattttcaatgaaccttcagagggcaaaaggaaagttttccctcagctccaacagttttggcccagtgaacaggacaaccaaaactgctctgctcttccgaaaattgcagtcagggaacctgggacccggcaagccagcagaaggaacacagttggagactctggttattttaccaaggctttgactgaaatgccatattttcagatgtgaccagacagctttaagaaactgaggttgatattatgaagcccataggagcttttggaaaaactggtctaatatcctaaatacacggttcacataatgggcttgtgacactgaggggcaccagaggagcagactacaagaatggcacacgctatggaaaactcctggacaatcagtaaagagtaccatattgatgaagaagtgggctttgctctgccaaatccacaggaaaatctacctgatttttataatgactggatgttcattgctaaacatctgcctgatctcatagagtctggccagcttcgagaaagagttgagaagttaaacatgctcagcattgatcatctcacagaccacaagtcacagcgcctt

SEQ ID NO: 8524 - DNA, 2333 bp, Homo sapiens
gggactgtgttaagaaccaagggcatataaagacagatgggaggagaccctggccggggagaggaagaagcatctacataggtactaagtaccattcgctaattcagcttagagaactatcaacacaggacaatgcaagcccatgagctgttccggtattttcgaatgccagagctggttgacttccgacagtacgtgcgtactcttccgaccaacacgcttatgggcttcggagcttttgcagcactcaccaccttctggtacgccacgagacccaaacccctgaagccgccatgcgacctctccatgcagtcagtggaagtggcgggtagtggtggtgcacgaagatccgcactacttgacagcgacgagcccttggtgtatttctatgatgatgtcacaacattatacgaaggtttccagaggggaatacaggtgtcaaataatggcccttgtttaggctctcggaaaccagaccaaccctatgaatggctttcatataaacaggttgcagaattgtcggagtgcataggctcagcactgatccagaagggcttcaagactgccccagatcagttcattggcatctttgctcaaaatagacctgagtgggtgattattgaacaaggatgctttgcttattcgatggtgatcgttccactttatgatacccttggaaatgaagccatcacgtacatagtcaacaaagctgaactctctctggtttttgttgacaagccagagaaggccaaactcttattagagggtgtagaaaataagttaataccaggccttaaaatcatagttgtcatggatgcctacggcagtgaactggtggaacgaggccagaggtgtggggtggaagtcaccagcatgaaggcgatggaggacctgggaagagccaacagacggaagcccaagcctccagcacctgaagatcttgcagtaatttgtttcacaagtggaactacaggcaaccccaaaggagcaatggtcactcaccgaaacatagtgagcgattgttcagcttttgtgaaagcaacagagaatacagtcaatccttgcccagatgatactttgatatctttcttgcctctcgcccatatgtttgagagagttgtagagtgtgtaatgctgtgtcatggagctaaaatcggatttttccaaggagatatcaggctgctcatggatgacctcaaggtgcttcaacccactgtcttccccgtggttccaagactgctgaaccggatgtttgaccgaattttcggacaagcaaacaccacgctgaagcgatggctcttggactttgcctccaagaggaaagaagcagagcttcgcagcggcatcatcagaaacaacagcctgtgggaccggctgatcttccacaaagtacagtcgagcctgggcggaagagtccggctgatggtgacaggagccgccccggtgtctgccactgtgctgacgttcctcagagcagccctgggctgtcagttttatgaaggatacggacagacagagtgcactgccgggtgctgcctgaccatgcctggagactggaccgcaggccatgttggggccccgatgccgtgcaatttgataaaacttgttgatgtggaagaaatgaattacatggctgccgagggcgagggcgaggtgtgtgtgaaagggccaaatgtatttcagggctacttgaaggacccagcgaaaacagcagaagctttggacaaagacggctggttacacacaggggacattggaaaatggttaccaaatggcaccttgaaaattatcgaccggaaaaagcacatatttaagctggcacaaggagaatacatagcccctgaaaagattgaaaatatctacatgcgaagtgagcctgttgctcaggtgtttgtccacggagaaagcctgcaggcatttctcattgcaattgtggtaccagatgttgagacattatgttcctgggcccaaaagagaggatttgaagggtcgtttgaggaactgtgcagaaataaggatgtcaaaaaagctatcctcgaagatatggtgagacttgggaaggattctggtctgaaaccatttgaacaggtcaaaggcatcacattgcaccctgaattattttctatcgacaatggccttctgactccaacaatgaaggcgaaaaggccagagctgcggaactatttcaggtcgcagatagatgacctctattccactatcaaggtttagtgtgaagaagaaagctcagaggaaatggcacagttccacaatctcttctcctgctgatggccttcatgttgttaattttgaatacagcaagtgtagggaaggaa

SEQ ID NO: 8525 - DNA, 730 bp, Homo sapiens
taggagatgatagtaaaaatacctaatgctctgtttttatacctcatactaggtagccaatctgaattctaaggacctctcatataccttaaaggattatgtttttaaagagcttcaaagagactggcctggatacagtgaaatagacagacggtcattggagtcagtgctctctagaaaactaaatccgtctcagaatgctgcaggcaccagccgttcagaatctcctgtatgttctagtagagacgctgtatcttctcctcaggtatgtcataaacatagaattatagacctgacatagatattaggggcctctaatcaggtcctctgatgtataagtgaaggaaatgagacccggagaagctggacagcttgcctgcccaaagccatctggttatggctgagcttagcctagaatttaggtcttggcttccagcccagaactttctccactacacagcactgcttgtcagagtacttaatgtctaccttgctttccatttttaaagtttacattttgttgtaagattatctactttccaatttggtcactaactagaagacttacccagtcccaaacaattatcagattatatggaaaattgaagatacttaattttgtctgtcaacatgttccagaagaatattttttggggaaaatggatttacaatcaacaaataaacaaaaatgatggcatgtttccatgttttctttttaattggatcctta

SEQ ID NO: 8526 - DNA, 776 bp, Homo sapiens
atgatgatcctgcaggtttcagggggcccctggacagtggctctgacagcattactgatggtgctgctcatatctgtggtccagagcagggccactccagagaattccgtctaccaggaacggcaggaatgctatgcgttcaatgggactcagcgcgttgtggacgggctcatctacaaccgggaggaatacgtgcattttgacagcgcagtgggggagttcctagcagtgatggagctggggcggcccataggcgagtacttcaatagccagaaggactttatggaacggaagcgagccgaggtggacaaggtgtgcagacacaagtacgagctgatggagccactcatccggcagcgccgagtccagcctagggtgaacatcccccctccaagaaggagccccggcagcaccaccacctgcttgtctaccacgtgacagatttctacccaggcagcattcaagtccgatgcttcctgaatggacaggaggaaacagctggggtcatgtccaccaagctgatccgtaatggagactggaccttccagatcctggagatgctggaaatgatcccccagcagggaaacatctacacctgccaagtgaagcaccccagcctggacagtcctgtcaccgtggagtggaaggcacagtctgattttgtgcagagcaagatgctgacaggagccaggggcttcatgctggggctcatcatctgtggagtggacatcttcacgcacagaaggagcaagaaagttcaacaaggatctgcataa

SEQ ID NO: 8527 - DNA, 1479 bp, Homo sapiens
ggcttttacaaagagatcaacaatagaacaggagaaattctaccagatgcaaaaagaaaagggcaagggagaatataaacgtttgcctaattcactgatctgcttaaactgccttttaatgcttagaaaatagaaaggatggcacgatcctttgatgaaaggaggctgtttatgtcagaagaagtccagacctctcacagtgacgaggggagaataaaaaagctgcaacatcaggtatcctgatgtgcagactcgagtgcaggcagaattggatcaggtcgtggggagggaccgtctgccttgtatgggtgaccagcccaacctgccctatgtcctggccttcctttatgaagccatgcgcttctccagctttgtgcctgtcactattcctcatgccaccactgccaacacctctgtcttgggctaccacattcccaaggacactgtggtttttgtcaaccagtggtctgtgaatcatgacccagtgaagtggcctaacccggagaactttgatccagctcgattcttggacaaggatggcctcatcaacaaggacctgaccagcagagtgatgattttttcagtgggcaaaaggcggtgcattggcgaagaactttctaagatgcagctttttctcttcatctccatcctggctcaccagtgcgatttcagggccaacccaaatgagcctgcgaaaatgaatttcagttatggtctaaccattaaacccaagtcatttaaagtcaatgtcactctcagagagtccatggagctccttgatagtgctgtccaaaatttacaagccaaggaaacttgccaataagaagcaagaggcaagctgaaattttagaaatattcacatcttcggagatgaggagtaaaattcagtttttttccagttcctcttttgtgctgcttctcaattagcgtttaaggtgagcataaatcaactgtccatcaggtgaggtgtgctccatacccagcggttcttcatgagtagtgggctatgcaggagcttctgggagatttttttgagtcaaagacttaaagggcccaatgaattattatatacatactgcatcttggttatttctgaaggtagcattctttggagttaaaatgcacatatagacacatacacccaaacacttacaccaaactactgaatgaagcagtattttggtaaccaggccatttttggtgggaatccaagattggtctcccatatgcagaaatagacaaaaagtatattaaacaaagtttcagagtatattgttgaagagacagagacaagtaatttcagtgtaaagtgtgtgattgaaggtgataagggaaaagataaagaccagaaattcccttttcaccttttcaggaaaataacttagactctagtatttatgggtggatttatccttttgccttctggtatacttccttacttttaaggataaatcataaagtcagttgctcaaaaagaaa

SEQ ID NO: 8528 - DNA, 2947 bp, Homo sapiens
acaaagcagataaggattcctaggctaggagctacctcgtcctctggctccagccaagcgtcctatccggagccaactgtagctgggatccagcgagaggaagatgctcaaggtgtcagccgtactgtgtgtgtgtgcagccgcttggtgcagtcagtctctcgcagctgccgcggcggtggctgcagccggggggcggtcggacggcggtaattttctggatgataaacaatggctcaccacaatctctcagtatgacaaggaagtcggacagtggaacaaattccgagacgaagtagaggatgattatttccgcacttggagtccaggaaaacccttcgatcaggctttagatccagctaaggatccatgcttaaagatgaaatgtagtcgccataaagtatgcattgctcaagattctcagactgcagtctgcattagtcaccggaggcttacacacaggatgaaagaagcaggagtagaccataggcagtggaggggtcccatattatccacctgcaagcagtgcccagtggtctatcccagccctgtttgtggttcagatggtcatacctactcttttcagtgcaaactagaatatcaggcatgtgtcttaggaaaacagatctcagtcaaatgtgaaggacattgcccatgtccttcagataagcccaccagtacaagcagaaatgttaagagagcatgcagtgacctggagttcagggaagtggcaaacagattgcgggactggttcaaggcccttcatgaaagtggaagtcaaaacaagaagacaaaaacattgctgaggcctgagagaagcagattcgataccagcatcttgccaatttgcaaggactcacttggctggatgtttaacagacttgatacaaactatgacctgctattggaccagtcagagctcagaagcatttaccttgataagaatgaacagtgtaccaaggcattcttcaattcttgtgacacatacaaggacagtttaatatctaataatgagtggtgctactgcttccagagacagcaagacccaccttgccagactgagctcagcaatattcagaagcggcaaggggtaaagaagctcctaggacagtatatccccctgtgtgatgaagatggttactacaagccaacacaatgtcatggcagtgttggacagtgctggtgtgttgacagatatggaaatgaagtcatgggatccagaataaatggtgttgcagattgtgctatagattttgagatctccggagattttgctagtggcgattttcatgaatggactgatgatgaggatgatgaagacgatattatgaatgatgaagatgaaattgaagatgatgatgaagatgaaggggatgatgatgatggtggtgatgaccatgatgtatacatttgattgatgacagttgaaatcaataaattctacatttctaatatttacaaaaatgatagcctatttaaaattatcttcttccccaataacaaaatgattctaaacctcacatatattttgtataattatttgaaaaattgcagctaaagttatagaactttatgtttaaataagaatcatttgctttgagtttttatattccttacacaaaaagaaaatacatatgcagtctagtcagacaaaataaagttttgaagtgctactataataagtttttcacgagaacaaactttgtaaatcttccataagcaaaatgacagctagtgcttgggatcgtacatgttaattttctgaaagataattctaagtgaaatttaaaataaataaatttttaatgacctgggtcttaaggatttaggaaaaatatgcatgctttaattgcatttccaaagtagcatcttgctagacctagttgagtcaggataacagagagataccacatggcaagaaaaacaaagtgacaattgtagagtcctcaattgtgtttacattaatagtggtgtttttacctatgaaattattctggatctaataggacattttacaaaatggcaagtatggaaaaccatggattctgaaagttaaaaatttagttgttctccccaatgtgtattttaatttggatggcagtctcatgcagattttttaaaagattctttaataacatgatttgtttgcctttctagatttctttatctttctgaccagcaacttagggagcagaatttaaattaggaagacaaagggaaagattcatttaaaccatatttttacaaagtttgtcatttgccccaaggtcaaattttaaattcttaattttcattttatttcccattttaggtaaaagtttgcatttaatcttagaattatgttatttttgttagtagtgtggaaacttagagaacttattgtatggtgccttgcaaaaatagagatagaaagattttagcatgcataccaatatagtatattacgcaatatataagcacacctaattaacagattaatatcagtaaaggtattgctgctggaatgaagaaaatgggatacgtttgtttctttttttctattgttacataattgccatgtggacttgtttatgattattgtgtagagtagcatttaagatttaactgtagcaaaaattactttaaccgctgtatttaagttagcatgttaattaattgtgtagacattttggcacaccatcacttttaactatatcataccaatggttttgtgcccataataaaaatggaaaaacctgttgaatgttacgtattggtatctttaatttcaacagtgggtaaactggtttcccagtatacaattcattgaaagcaaaattgattaattatttccatttaatttatacacactcaatacaaaatttaatgttgactttacgtaataaagtataatgcattttcttttttactgtttatgtatagtttacaaaataaagaatcttgtaac

SEQ ID NO: 8529 - DNA, 584 bp, Homo sapiens
cattgctgctacttcctggagcttaatgcgctttgcttttttggctctaacctctctcggctagacgagcttccccaactggtaacccttccacaccccaatcttcatggaccagagatcttggatgttccttccacagttcaaaagacccctttcgtcacccaccctgggtatgacactggaaatggtattcagcttcctggcacttctggtcagcaacccagtgttgggcaacaaatgatctttgaggaacatggttttaggcggaccacaccgcccacaacggccacccccataaggcataggccaagaccatacccgccgaatgtaggtgaggaaatccaaattggtcacatccccagggaagatgtagactatcacctgtacccacacggtccgggactcaatccaaatgcctctacaggacaagaagctctctctcagacaaccatctcatgggccccattccaggacacttctgagtacatcatttcatgtcatcctgttggcactgatgaagaacccttacagttcagggttcctggaacttctaccagtgccactctgacaggcctcaccagagg

SEQ ID NO: 8530 - DNA, 474 bp, Homo sapiens
aaaagaagaagaagaaaggaaagaaaaaaaagataaaatggaataaaagtgcagaatgctgactccctcgaggcttttcctaaccattctattctatggtggatgctacggtcagcatgtttttttaattgttgttttttgttggtggggggtgtttagatcattaaagaaatggtttcatcatccactttctctcatgtcccttttctcatcagctggcatattccaggccatgtgtctcctgatctgtgccgagatgtaccaagtgtccagactgcagcacatctgtgagctgttcatcattacccagctgcagagcatgccaagcagggaactggcatccatgaaccttgatatagttgacctgcttaaaaaggccaagtttcaccactctgattgcctttcaacctggctacttcatttcattgctactaactacctcatcttcagtcaaaagcctgaatttcaggatct

SEQ ID NO: 8531 - DNA, 797 bp, Homo sapiens
gcaattctgataattatagtccctggagttatgcagctaattaaaggtcaaacgcagaactttaaagacgccttttcaggaagagattcaagtattacgcggttgccactggctttttattatggaatgtatgcatatgctggctggttttacctcaactttgttactgaagaagtagaaaaccctgaaaaaccttttctgagcggctactgggaaatttctcattagcagttccgatctttgttgccctctcctgctttggctccatgaacggtggtgtgtttgctgtctccagcaccctttgacaatgataatgctcttctctggagacctcgacagtcttttgaatttcctcagttttgccaggtggctttttattgggctggcagttgctgggctgatttatcttcgatacaaatgcccagatatgcatcgtcctttcaaggtgccactgttcatcccagctttgttttccttcacatgcctcttcatggttgccctttccctctattcggacccatttagtacagggattggcttcgtcatcactctgactggagtccctgcgtattatctctttattatatgggacaagaaacccaggtggtttagaataatgtcggagaaaataaccagaacattacaaataatactggaagttgtaccagaagaagataagttatgaactaatggacttgagatcttggcaatctgcccaaggggagacacaaaatagggatttttacttcattttctgaaagtctagagaattacaactttggtgataaacaaaagga

SEQ ID NO: 8532 - DNA, 808 bp, Homo sapiens
gcgggcggggcggggccgcgggagggcggggccggcgcggcgagcgcaccagcagcatcctggctcagccgcggcggtggcgggggcgcaaccagcgggccgaggcggcggcgccagcggcgccttaaatagcatccagagccggcgcggggcagggagtgggctgcagtgacagccggcggcggagcggccggtccacggaggagggtagtggtggtgcacgaagatccgcactacttgacagcgacgagcccttggtgtatttctatgatgatgtcacaacattatacgaaggtttccagaggggaatacaggtgtcaaataatggcccttgtttaggctctcggaaaccagaccaaccctatgaatggctttcatataaacaggttgcagaattgtcggagtgcataggctcagcactgatccagaagggcttcaagactgccccagatcagttcattggcatctttgctcaaaatagacctgagtgggtgattattgaacaaggatgctttgcttattcgatggtgatcgttccactttatgatacccttggaaatgaagccatcacgtacatagtcaacaaaggacctgggaagagccaacagacggaagcccaagcctccagcacctgaagatcttgcagtaatttgtttcacaagtggaactacaggcaaccccaaaggagcaatggtcactcaccgaaacatagtgagcgattgttcagcttttgtgaaagcaacagagaatacagtcaatccttgcccagatgatactttgatatctttcttgcctctcgcccatatgt

SEQ ID NO: 8533 - DNA, 1785 bp, Homo sapiens
ggcagcagcatggggaaaggacgcgcgggccgagttggcaccacagccttgcctccccgattgaaagagatgaaaagccaggaatcggctgcaggttccaaactagtccttcggtgtgaaaccagttctgaatactcctctctcagattcaagtggttcaagaatgggaatgaattgaatcgaaaaaacaaaccacaaaatatcaagatacaaaaaaagccagggaagtcagaacttcgcattaacaaagcatcactggctgattctggagagtatatgtgcaaagtgatcagcaaattaggaaatgacagtgcctctgccaatatcaccatcgtggaatcaaacgctacatctacatccaccactgggacaagccatcttgtaaaatgtgcggagaaggagaaaactttctgtgtgaatggaggggagtgcttcatggtgaaagacctttcaaacccctcgagatacttgtgcaagtgcccaaatgagtttactggtgatcgctgccaaaactacgtaatggccagcttctacaagcatcttgggattgaatttatggaggcggaggagctgtaccagaagagagtgctgaccataaccggcatctgcatcgccctccttgtggtcggcatcatgtgtgtggtggcctactgcaaaaccaagaaacagcggaaaaagctgcatgaccgtcttcggcagagccttcggtctgaacgaaacaatatgatgaacattgccaatgggcctcaccatcctaacccaccccccgagaatgtccagctggtgaatcaatacgtatctaaaaacgtcatctccagtgagcatattgttgagagagaagcagagacatccttttccaccagtcactatacttccacagcccatcactccactactgtcacccagactcctagccacagctggagcaacggacacactgaaagcatcctttccgaaagccactctgtaatcgtgatgtcatccgtagaaaacagtaggcacagcagcccaactgggggcccaagaggacgtcttaatggcacaggaggccctcgtgaatgtaacagcttcctcaggcatgccagagaaacccctgattcctaccgagactctcctcatagtgaaaggtatgtgtcagccatgaccaccccggctcgtatgtcacctgtagatttccacacgccaagctcccccaaatcgcccccttcggaaatgtctccacccgtgtccagcatgacggtgtccatgccttccatggcggtcagccccttcatggaagaagagagacctctacttctcgtgacaccaccaaggctgcgggagaagaagtttgaccatcaccctcagcagttcagctccttccaccacaaccccgcgcatgacagtaacagcctccctgctagccccttgaggatagtggaggatgaggagtatgaaacgacccaagagtacgagccagcccaagagcctgttaagaaactcgccaatagccggcgggccaaaagaaccaagcccaatggccacattgctaacagattggaagtggacagcaacacaagctcccagagcagtaactcagagagtgaaacagaagatgaaagagtaggtgaagatacgcctttcctgggcatacagaaccccctggcagccagtcttgaggcaacacctgccttccgcctggctgacagcaggactaacccagcaggccgcttctcgacacaggaagaaatccaggccaggctgtctagtgtaattgctaaccaagaccctattgctgtataaaac

SEQ ID NO: 8534 - DNA, 541 bp, Homo sapiens
ttttcctatctctgaatgaaaaaaaaaaatttctgattctctttttgcagataataaggagatttttctttccaaagcaattcacaagtccttcctagaggttaatgaagaaggctcagaagctgctgctgtctcaggaatgattgcaattagtaggatggctgtgctgtatcctcaagttattgtcgaccatccatttttctttcttatcagaaacaggagaactggtacaattctattcatgggacgagtcatgcatcctgaaacaatgaacacaagtggacatgatttcgaagaactttaagttactttatttgaataacaaggaaaacagtaactaagcacattatgtttgcaactggtatatatttaggatttgtgttttacagtatatcttaagataatatttaaaatagttccagataaaaacaatatatgtaaattataagtaacttgtcaaggaatgttatcagtattaagctaatggtcctgttatgtcattgtgtttgtgtgctgttgtttaaaataaaagtacctattg

SEQ ID NO: 8535 - DNA, 1643 bp, Homo sapiens
agccccagtggacttttgctgcaggctcatggttcctgcaggcagattaaccctgtcccttttcttgctactgacatcagctcccctcgttttggtgcagcctgaacagtgtcaacagcagtgactcccggtccagcggctcccactcgcattcccccagctcacattaccgctaccgcagctccaacctggcccagcaggctcctgtgaggctgtccagcgtgtcctcccatgactcaggattcatatcccaggatgccttccagtccaagtcaccatcccccatgccgccagaggcccccaaccagttgtctaacgggttttctcactatagtttatcaagtgagtcccacgtggggcccacgggtgcaggccttttccctcattgcctgcctgcctcccgcctgctccctcgggtcacctctgtccaccttccagactacgctcattattacaccattgggcccggcatgttcccgtcatctcagatccctagctggaaggactgggctaagcctgggccctatgaccagcctctggtgaacaccctgcagcgccgcaaagagaagcgagaaccggaccccaacgggggaggacccactaccgccagcggcccacctgcagcagctgaggaggctcagagaccacggagcatgactgtatcggctgccaccaggcctggtgaggagatggaggcttgtgaggagctggccctggccctgtctcggggcctgcagctggacacccagaggagcagccgggactcgcttcagtgctccagcggctacagcacccagacaaccaccccctgctgctctgaggacaccatcccttcccaagtttcagattatgattatttctctgtaagtggtgaccaggaggcagatcagcaggagttcgacaagtcctccaccattccaagaaacagcgacatcagccagtcctaccgacggatgttccaagccaagcgtccagcctcaactgctggcctccccaccaccctgggacctgctatggtcactccaggggttgcaactatccgacggaccccttccaccaagccttctgtccgccggggaaccattggagctggtcccatccccatcaagacacccgtgatccctgtcaagaccccaaccgtcccagacctcccaggggtgttgccagcccctccagatgggccagaagagcggggggagcacagccctgagtcgccatctgtgggtgagggcccccaaggtgtcaccagcatgccctcctcaatgtggagcggccaagcttccgttaaccctccacttccaggcccgaagcccagtatccctgaggagcacagacaggcaattccagaaagtgaagctgaagaccaggaacgggaacccccaagtgccactgtctccccaggccagattccagagagtgaccctgcagacctgagcccaagggatactccacaaggagaagacatgctgaacgccatccgaaggggcgtgaaactgaagaagaccacgacaaacgatcgctcagcccctcgcttttcttaggttcacaagaaatgcgccggtggggaatgaactgtttcattaataaaacctaatttgtcttgatccattccactctataataaaacaaaagattttgtaggc

SEQ ID NO: 8536 - DNA, 1905 bp, Homo sapiens
aggaaatgcattttgtgagaagaataattgtatttgagtgtctctgtaaaaatcaggaagtcttttagcagtagtggaggacatgctagaggacgaggaagaagaagatgacaaagatgacaaggacagtgaaaaaaagggatttataaataaaatctatgccatccaggaggtatgtgtcagtgtccagaacatcctagatgaagtggcttcctttggcgaaaggataaagaatactttcaactggactgtcccattcttaagctggctggccattgtagccctctgtgtgttcacagccatcctgtactgcattccgctgagatacattgtccttgtctggggcatcaataaatttacaaaaaagcttcggagtccatatgcaattgataacaatgaactacttgacttcctttccagagtcccttcagatgtacaagtgctgcaattctgtcttgagagctgcctgacttgccttcattttgagatctgtgatgtaaatatttcttaagagactgaatgtcactcaaacatctacttggactgctaactattatagatattgtgaactactaaatatattcctttagtatcttttagtgagtaaattcactgagtcattatttatattcataaactattactgacattcgttgtgataattcataagaaatgcgtatttgtgcttttaaatttttccccacttatcaaaaagaacataatagtacttctcattcattctggtactgttccagactcaaactgattgattgattgaatctcccaactcagattatcctagtgcatatagaatgttcaaaaactggaattcctacagaacctatcaatcaatcaatcagtttttgaacattctatatgcactaggataatctgagttgggagattcttaaaaggactctgtgatatatttatcgaataccaactgtatgaccctgttatagacaacggtcaaaccaatgattgtatactaaaatcaaatctggagttgaagtacagtgagagccaaatttaattgatacatttctaaaattatcttttataaaatttttattctgcatttaaaagtgaagaaaaactcagaagtaaatgcttatctagggaccacaggagctttttttccactttgatctcatatctaaggtctcctatgctcaaagtagtctacatttgtattaatgttattcaaaggcagtaatttcagcgaataaacttgttaaatgggcctaaatgtttataatgttgactaagcattaagaacaaacaaaaaggtataaggcagttatacctttttgctccagaaatacaagtaaagacagctaccattatacttcttgaaaaacgtctcaggtattgctaaattaatacttgcttaaattcttgggctttaaatgaatagcgtgatttcacactctagtgtgagtgagtgtacagatgatgtctattcgttggtttgattagggtatctagaatcagccttttctaattgctcagtaaagtatgaattaaaaccacatagaaaataatgtggtaaattctttcttacaatagtgtcattcctttcaattataattctttttcctgggatgattggtgtaactcactgaaagaaaacaaaacatttttttttcttttttttttggtgaaaatgttaccctctggtacctcagtttcttttatatagtggcaatttgaatagaggcagtcacataagatttacttcagctgaatggctaaaatttgagaaatactattgaaaaatctcattaaaaaatagtatgcaaataaaaactatcaaatgtccaaagcaatcatacaatgtagaaactaagagcaccatgaaaggtttcctggaacttaatgattctatctgtgcttttcaaagga

SEQ ID NO: 8537 - DNA, 2752 bp, Homo sapiens
ttttcctaaggatgtctgtgagtctggggtgccatgtggtttggaagactacaggccaatggccagaaccaggggctctgagctgagtgtcactgcatgtggggaccacaggacattgcaggcagccaccttcaggcgaggggatggacatatcactggactcctgacaaggtcttggcgggctcaccactggcagctggggctgagttttgggccaacatttctgctagcccagatccccggtcacactttacacagtcacttcttataaacactttcattggtgataccatgcttggggtaaagttcatgtttcccccatctcagcaccaaaggaagagagtgtgcataaaaagtgggtgtttcctgaggatctcattggaccacctttgtaggcagagcttcctgtgtgtatggctataatccagcatttcccaaatcatgaaatggaccaactttgtgttccagattattgctcttaataaaaccaaagaacgaatgcgaccttaccaaagcaaccaagaagacgaagatccagacatcaagaagattaaaaaggttcagagcttcatgcgaggatggttgtgcagaaggaaatggaagaccatcgtgcaggattacatttgttctcctcatgctgaaagtatgaggaagagaaaccagattgtgttcaccatggtggaggcagagtcagagtacgttcaccagctctacatcctggtcaatggctttctccggcccctgcgtatggccgccagctccaagaagccccccatcagccacgacgacgtcagcagtatttttcttaacagtgaaacaatcatgtttcttcatgaaatatttcatcaaggactaaaggcaaggatagcaaactggcccactttaattttagctgatctgtttgatattttgctccccatgctgaacatttatcaagaatttgtgcgtaatcaccagtacagcctgcaagttctcgccaattgtaagcaaaacagagattttgacaaactcttaaaacagtatgaagccaatccagcctgtgaggggaggatgctggagacattcttgacctatcccatgtttcagatccccagatatatcatcacactccatgagctccttgctcacacaccccatgagcatgtggaaaggaaaagcctggagtttgccaaatcaaagctagaggaactatccagagtaatgcacgatgaagtcagcgacactgaaaacataaggaaaaaccttgccatcgaaagaatgatcgtggagggctgtgacatcttgctggacaccagccaaacgttcatccgccaagggaccatgaaaaacagcaacacaatcatagtaaagcacgagtggggcaggcagttacattctgactggacgctcctcctcagcggcccggacattctctgcagctccaaggaggaccggtcggcctggcccacggccgtggcagtgccaagtgctgacgatacccaggccaaggcccaggagaaacttgcgttgctcaaagccctttcacataagactggggaccatgtccgaagtgaaaacagctgtctgttgttcccatttttcatcagcacttccggatccgccccacacgatataatttgattcaactggtaactcccgttgccagatgaaatgtctctgatggacacttgccacgctttggtaatgcagaagctgtcgtgtttgcgaagtgtgctttgggggcatcactcgataaattaagcttttgaagagttgaagatatttgtgccggaaactgtggagaagcaacagcctgacagtgcctatttctcctcggctgttatttcaaaatgcaagacgtaaaccacatcccaagttatttttttagtgcttaggtcctctgggggaggggagaatgccccaggcaattgatttgagacaatatattgcacacatttataattttgaatttggtgaggagtggaatataaatttggaactcaaattaatcgttaatgtagtttctgtttataatgtgccaatacatttgaagatatttgtgttgccattgcctaccataatgtactgcttaaaatctctttttacctcatcaagaacaagacaatgttttgtgcacattaatttttgcacagactactttaaaagtttaatgcatgccattctattttccattatttatttacaaggagaaaccacacatatgttaaagtttgggagtgtattttaggaaatgattccttttctcatttttggctttagatattcttttttctttaaataagggtggaatataatgctgacaacatcaggcccttgtaatgcctcctctattcctctgcacagactgtgtccccacattggcttcctgcctgccagcctctgtgcctttccttgtgctgtccccagcctgggggctgggaatgtccttatccatttcttttgtgcctgttgaagttctgcttgtcccaccaggctcagatcagatacctcgaaggagccttttataatttcctcttcttcctcctcccctctcctccagttagaatggatttaccttccacttgtttccaaggcactttactcctggtgcgtgtatttcatcctcttgcttgtatacctctctctcctggttactgtaaactctgaagggcagcacttaaggaattctctctgccttaccttgtctagtatgatgctttttgttacagatacctggaaaatgggcgttgaattaaattatttactgaattgc

SEQ ID NO: 8538 - DNA, 350 bp, Homo sapiens
agtatggaatgagctgagtcatcgtctgagtgtgttagcaaggctctgaaacacagccacatttcccagccagaaaactatcaggagtttgttcggctgcaggtggacacgtcgatctgacaatgctaggagcgatgcaggtttccaaatatggtgacctggctaactggatgatacctgggaagatggtgaaaggaatgggaggtgctatggatttagtgtccagtgcgaaaaccaaagtggtggtcaccatggagcattctgcaaagggaaatgcacataaaatcatggagaaatgtacattaccattgactggaaagcaatgtgtcaaccgcattattactgaaaag

SEQ ID NO: 8539 - DNA, 871 bp, Homo sapiens
ttctaggatgttcacttctccacaatgaatgagtgtcactatgacaagcacatggactttttttataataggagcaacactgatactgtcgatgactggacaggaacaaagcttgtgattgttttgtgtgttgggacgtttttctgcctgtttatttttttttctaattctctggtcatcgcggcagtgatcaaaaacagaaaatttcatttccccttctactacctgttggctaatttagctgctgccgatttcttcgctggaattgcctatgtattcctgatgtttaacacaggcccagtttcaaaaactttgactgtcaaccgctggtttctccgtcaggggcttctggacagtagcttgactgcttccctcaccaacttgctggttatcgccgtggagaggcacatgtcaatcatgaggatgcgggtccatagcaacctgaccaaaaagaggtgtccaacctcatggccttcctcatcatggttgtggtgtacctgcggatctacgtgtacgtcaagaggaaaaccaacgtcttgtctccgcatacaagtgggtccatcagccgccggaggacacccatgaagctaatgaagacggtgatgactgtcttaggggcgtttgtggtatgctggaccccgggcctggtggttctgctcctcgacggcctgaactgcaggcagtgtggcgtgcagcatgtgaaaaggtggttcctgctgctggcgctgctcaactccgtcgtgaaccccatcatctactcctacaaggacgaggacatgtatggcaccatgaagaagatgatctgctgcttctctcaggagaacccagagaggcgtccctctcgcatcccctccacagtcctcagcaggag

SEQ ID NO: 8540 - DNA, 1526 bp, Homo sapiens
gaggcggagacacaaggctccgttccactgggcacgccagcggtagagacagggtttcaccatgttggccaggctggtctcaaactcctgagctcaggcgatctgcccgcctcggcctcccaaagtgctgggattacgggcgtgagccactgcacccggttcaagcgattctcctgcctcagccccctgagtagctgggattacaggcacgcgccaccactcccagatcttcacttcaggtcagctccaaggaggctatccttgcccatcttcctaaaatagagctctcaaaacctggctgttttccttcagagcactggcctccaattgctccggtagattgcaaatgacctgctttctttctgttcccgggcgtttggacccctgtcttggaccgctgtcggatagtaaatcccaagtaaggtacctgccgtcggcagatttgagctttcttcttggacacctaatacccagagtcctccaggctccggtagattgcaaatgacctgctttctttctgttcccgggcggcatcggacccgtcggagagtaaatcccaagtaaggtacctgccgttggcagatttgagctttcttcttggacacctaatacccacagtcctccaggctccggtagattgcaaatgacctgctttctttctgttcccgggtggcatcgacccgtcggagagtaaatcccaagtaaggtacctgccgttggcagatttgagctttcttcttggacacctaatacccacagtcctccagtaaatcccaagcaaggtacctgccgtcagcagatttgagctttcttcttggacacctaatacccacagtcctccaggctccggtagattgcaaatgacctgctttctttctgttcccgggctgcgttcggacccctgtcggatagtaactcccaagtaaggtacctgccgtcggcagattggagctttcttcttggagacctaatacccacagtcctccagaaaaacaaacaaagacatggatttactgtgcatattagcagatccatactggaaaatgcatggaggtttcatatacaccacttacagttttcagctcctcagtagtgacaaagccatacccatcattgtcgattcgatcaacaatcttccctagcctctccttgctctcgtccggggtgagctcgtcgaagttcttggagtcctccttgcccaggaaggcctcgtggtcgtactggaagctctggttgtcctcagggggccgctcgcccagctccgagtcgggccgcaccacgcgctctttgcgcaccgtgggcttggcccgcagaacccgcggcgccagcaccagcgccagcagcagccccagggctaaccccaggcggccaccgcgcgccatcgtcccgaggagagggcggccgggagggagacgctgagcgagcgacaacagcggcagctcgggaatgggggctcggagcgcggcggccaagttttatgttatgtatattttacaagtaaaaaaattttttcacctcagcctgaa

SEQ ID NO: 8541 - DNA, 1303 bp, Homo sapiens; identical to SEQ ID NO: 1312

SEQ ID NO: 8542 - DNA, 524 bp, Homo sapiens
atttccagcaggagctgcgagcacagtgctggctcacaacaagatgctcaaggtgtcagccgtactgtgtgtgtgtgcagccgcttggtgcagtcagtctctcgcagctgccgcggcggtggctgcagccggggggcggtcggacggcggtaattttctggatgataaacaatggctcaccacaatctctcagtatgacaaggaagtcggacagtggaacaaattccgagacgatgattatttccgcacttggagtccaggaaaacccttcgatcaggctctctccttccacgatttggggatttttgtgtgatgtgaatattgccataactgccttcctttggattagtacttgccagctttagatccagctaaggatccatgcttaaagatgaaatgtagtcgccataaagtatgcattgctcaagattctcagactgcagtctgcattagtcaccggaggcttacacacaggatgaaagaagcaggagtagaccataggcagtggaggggtcccatattat

SEQ ID NO: 8543 - DNA, 2520 bp, Homo sapiens
aacttcaatttttctgcagtggctctgggtccagccccttacttaaagatctggaaagcatgaagactgggctttttttcctatgtctcttgggaactgcagctgcaatcccggtgaaaaggagataagaagcaaaggagcaaaccaaacctaatatgaatcctgtactttggccagaagccgtggctcacatctgtaatcccagcactttgggaggccaagacaaatgcaagattattatctgatcattccaaaccaactgctgaaacggtagcacctgacaacactgcaatccccagtttaagggctgaagctgaagaaaatgaaaaagaaacagcagtatccacagaagacgattcccaccataaggctgaaaaatcatcagtactaaagtcaaaagaggaaagccatgaacagtcagcagaacagggcaagagttctagccaagagctgggattgaaggatcaagaggacagtgatggtcacttaagtgtgaatttggagtatgcaccaactgaaggtacattggacataaaagaagatatgagtgagcctcaggagaaaaaactctcagagaacactgattttttggctcctggtgttagttccttcacagattctaaccaacaagaaagtatcacaaagagagaggaaaaccaagaacaacctagaaattattcacatcatcagttgaacaggagcagtaaacatagccaaggcctaagggatcaaggaaaccaagagcaggatccaaatatttccaatggagaagaggaagaagaaaaagagccaggtgaagttggtacccacaatgataaccaagaaagaaagacagaattgcccagggagcatgctaacagcaagcaggaggaagacaatacccaatctgatgatattttggaagagtctgatcaaccaactcaagtaagcaagatgcaggaggatgaatttgatcagggtaaccaagaacaagaagataactccaatgcagaaatggaagaggaaaatgcatcgaacgtcaataagcacattcaagaaactgaatggcagagtcaagagggtaaaactggcctagaagctatcagcaaccacaaagagacagaagaaaagactgtttctgaggctctgctcatggaacctactgatgatggtaataccacgcccagaaatcatggagttgatgatgatggcgatgatgatggcgatgatggcggcactgatggccccaggcacagtgcaagtgatgactacttcatcccaagccaggcctttctggaggccgagagagctcaatccattgcctatcacctcaaaattgaggagcaaagagaaaaagtacatgaaaatgaaaatataggtaccactgagcctggagagcaccaagaggccaagaaagcagagaactcatcaaatgaggaggaaacgtcaagtgaaggcaacatgagggtgcatgctgtggattcttgcatgagcttccagtgtaaaagaggccacatctgtaaggcagaccaacagggaaaacctcactgtgtctgccaggatccagtgacttgtcctccaacaaaaccccttgatcaagtttgtggcactgacaatcagacctatgctagttcctgtcatctattcgctactaaatgcagactggaggggaccaaaaaggggcatcaactccagctggattattttggagcctgcaaatctattcctacttgtacggactttgaagtgattcagtttcctctacggatgagagactggctcaagaatatcctcatgcagctttatgaagccaactctgaacacgctggttatctaaatgagaagcagagaaataaagtcaagaaaatttacctggatgaaaagaggcttttggctggggaccatcccattgatcttctcttaagggactttaagaaaaactaccacatgtatgtgtatcctgtgcactggcagtttagtgaacttgaccaacaccctatggatagagtcttgacacattctgaacttgctcctctgcgagcatctctggtgcccatggaacactgcataacccgtttctttgaggagtgtgaccccaacaaggataagcacatcaccctgaaggagtggggccactgctttggaattaaagaagaggacatagatgaaaatctcttgttttgaacgaagattttaaagaactcaactttccagcatcctcctctgttctaaccacttcagaaatatatgcagctgtgatacttgtagatttatatttagcaaaatgttagcatgtatgacaagacaatgagagtaattgcttgacaacaacctatgcaccaggtatttaacattaactttggaaacaaaaatgtacaattaagtaaagtcaacatatgcaaaatactgtacattgtgaacagaagtttaattcatagtaatttcactctctgcattgacttatgagataattaatgattaaactattaatgataaaaataatgcatttgtattgttcataatatcatgtgcacttcaaga

SEQ ID NO: 8544 - DNA, 655 bp, Homo sapiens
gccgccctccccactgttaccaacatgaagctgctcgcagcaactgtgctactcctcaccatctgcagccttgaaggtctggcaaccaaagggctcaaaaggaagatcattccctctctaaagcccagaaagcccatccaaagatctggctggatacctttttggggagggggcagagagctggggtgggtactggcagaggtatggcaggaggccaggattcactgctgtggacccagctgaaaagagtgtgtgtgtgtgtgtgtgtgtgtgtgtgtgtgtgtgtgggcaggagctttggttcggagacaggcaaaggagccatgtgtggagagcctggtttctcagtacttccagaccgtgactgactatggcaaggacctgatggagaaggtcaagagcccagagcttcaggccgaggccaagtcttactttgaaaagtcaaaggagcagctgacacccctgatcaagaaggctggaacggaactggttaacttcttgagctatttcgtggaacttggaacacagcctgccacccagtgaagtgtccagaccattgtcttccaaccccagctggcctctagaacacccactggccagtcctagagctcctgtccctacccactctttgctacaataaatgctgaatgaatcc

SEQ ID NO: 8545 - DNA, 976 bp, Homo sapiens
agaagtcgataagaccaggagaagtgaagatgtaacatgttatctgtcgctcctcttagctggcggagagaatttacatttaaagattagcagagtgagaaagagaaatctgccttttgttgtgtggggtgaggaggaggcatctacccctggccttgacgctatctcccatcacctctgctatccagacaggactcaccgagaaaagattgatctctgggctggtgaacataatctctgtcccagtcagaaaaggagagaggaaattagcagagcgattggtggagaatgatatctgtcaaaagaaacacttggagagcactgagtttagtaataggtgactgccggaaaaaagggaactttgaatattgtcaagatcgtactgagaagcactccacaatgccagactcacctgtggatgtgaagacgcaatctaggctgactcctccaacaatgccacctcccccaactactcaaggagctccaagaaccagttcatttacaccgacaacgttaactaatggcacgagccattctcctacagccttgaatggcgccccctcaccacccaatggcttcagcaatgggccttcctcttcttcctcctcctctctggctaatcaacagctgcccccagcctgtggtgccaggcaactcagcaagctgaaaaggttccttactaccctgcagcagtttggcaatgacatttcacccgagataggagaaagagttcgcaccctcgttctgggactagtgaactccactttgacaattgaagaatttcattccaaactgcaagaagctactaacttcccactgagaccttttgtcatcccatttttgaaggccaacttgcccctgctgcagcgtgagctcctccactgcgcaagactggccaaacagaaccctgcccagtacctcgcccagcatgaacagctgcttctggatgccagcaccacctcacctgttgactcct

SEQ ID NO: 8546 - DNA, 653 bp, Homo sapiens
acaagttttaagtaattctaaaaatgaaagttttaaaatcttttacagcaatataaagaataggtgcagtatgggttagttaaaaataagaaggagagtttcacatagaaaattaaggaagagggagaaaaaccactaatcaaatcaaatgagattattcattttatgtatttcttcccaaatattttagattagaagacctgcgagtaaaactgaagaaagaaggatattctaatatttcttatattgttgttaatcatcaaggaatctcttctcgattaaaatacacacatcttaagaataaggtttcagagcatattcctgtttatcaacaagaagaaaaccaaacagatgtctggactcttttaaatggaagcaaagatgacttcctcatatatgatagatgtggccgtcttgtatatcatcttggtttgcctttttccttcctaactttcccatatgtagaagaagccattaagattgcttactgtgaaaagaaatgtggaaactgctctctcacgactctcaaagatgaagacttttgtaaacgtgtatctttggctactgtggataaaacagttgaaactccatcgcctcattaccatcatgagcatcatcacaatcatggacatcagcaccttggcagcagtgag

SEQ ID NO: 8547 - DNA, 1328 bp, Homo sapiens
gggagccgctgctggtcccggccttgcggcctgcgggggaggctgcccggaggaggcagcggcggcggcagcgcgtcctcggtccccaggaccacggcttctttcctgccagatctatccatctggccatccatccgtgggggtctgcaatggccacctttagccgccaggaatttttccagcagctactgcaaggctgtctcctgcctactgcccagcagggccttgaccagatctggctgctccttgccatctgcctcgcctgccgcctcctctggaggctcgtgagatgcacatggtagacaccgtgacatggcacaagatgcgaggtggctgcgagcctacgagagtgctgtctccttccacttcagcaactattttgtgggctttctttccgaggccacggccacgttggcgggggctggctttaccgaggagaaggatcacctggaatgggacctgacggtgtccaagccactgaatgtggagctgcctcggtcaatggtggaagttgtcacaagctggaacctgcccatgtcttattggctaaataactatgttttcaagaatgctctccgcctggggaccttctcggctgtgctggtcacctatgcagccagcgccctcctacatggcttcagtttccacctggctgcggtcctgctgtccctggcttttatcacttacgtggagcatgtcctccggaagcgcctggctcggatcctcagtgcctgtgtcttgtcaaagcggtgcccgccagactgttcgcaccagcatcgcttgggcctgggggtgcgagccttaaacttgctctttggagctctggccatcttccacctggcctacctgggctccctgtttgatgtcgatgtggatgacaccacagaggagcagggctacggcatggcatacactgtccacaagtggtcagagctcagctgggccagtcactgggtcacttttggatgctggatcttctaccgtctcataggctgaggcacatctgtggaccctcataaccctcttaagacccctctcagggtgccactgatgggggatgagggaaggccctctctctactccttgaccccctccatccttgacccccaacacctcaacacacacacacacacacacacacaaaatcacaccattttcatgcctgtcaatccccaccccaccacaaggcaggaagggggtggtgcctgctggggcctagagggggatgcttggggaaacagagaaggggagatccagggcctccccgccttccttcttcctttttatatacaatttgttattgtcaaataaaagtaggaaatattcaa

SEQ ID NO: 8548 - DNA, 580 bp, Homo sapiens
gaaagctcgctgtcgctgggaggcgcgcgccggcgttcctcggccgctccgggtacctgagggacgcgcggccgcccgcggcaggcggtgcagcccccccaccccttggagccaggcgccggggtctgagatatttcagttgaaggaagaaatagctcttctcctaagatggaatctgtggtttgggaatgtggttgatcaacttgatatgttggccaaatgtgccccatgtaataaaatgaaaagaagagacaagatgatgtcattttcccatattgtgaaaccaaaaacaaacgccttttgtgagaccaagctaacaaacctctgacggtgcgaagagtatttaactgtttgaagaatttaacagtaagatacagaagaagtaccttcgagctgagacctgcaggtgtataaatatctaaaatacatattgaataggcctgatcatctgaatctccttcagacccaggaaggatggctatgacttggattgtcttctctctttggcccttgactgtgttcatggggcatataggtgggcacagtttgttttcttgtgaacctattaccttgaggatgt

SEQ ID NO: 8549 - DNA, 1146 bp, Homo sapiens
ctgacggacagacagacagacaccgcccccagccccagctaccacctcctccccggccggcggcggacagtggacgcggcggcgagccgcgggcaggggccggagcccgcgcccggaggcggggtggagggggtcggggctcgcggcgtcgcactgaaacttttcgtccaacttctgggctgttctcgcttcggaggagccgtggtccgcgcgggggaagccgagccgagcggagccgcgagaagtgctagctcgggccgggaggagccgcagccggaggagggggaggaggaagaagagaaggaagaggagagggggccgcagtggcgactcggcgctcggaagccgggctcatggacgggtgaggcggcggtgtgcgcagacagtgctccagccgcgcgcgctccccaggccctggcccgggcctcgggccggggaggaagagtagctcgccgaggcgccgaggagagcgggccgccccacagcccgagccggagagggagcgcgagccgcgccggccccggtcgggcctccgaaaccatgaactttctgctgtcttgggtgcattggagccttgccttgctgctctacctccaccatgccaagtggtcccaggctgcacccatggcagaaggaggagggcagaatcatcacgaagtggtgaagttcatggatgtctatcagcgcagctactgccatccaatcgagaccctggtggacatcttccaggagtaccctgatgagatcgagtacatcttcaagccatcctgtgtgcccctgatgcgatgcgggggctgctgcaatgacgagggcctggagtgtgtgcccactgaggagtccaacatcaccatgcagattatgcggatcaaacctcaccaaggccagcacataggagagatgagcttcctacagcacaacaaatgtgaatgcagaccaaagaaagatagagcaagacaagaaaatccctgtgggccttgctcagagcggagaaagcatttgtttgtacaagatccgcagacgtgtaaatgttcctgcaaaaacacagactcgcgttgcaaggcgaggcagcttgagttaaacgaacgtacttgcagatctctcaccaggaaagactgatacagaacgatcgatacagaaaccacgctg

SEQ ID NO: 8550 - DNA, 2939 bp, Homo sapiens
agtgcgaattcgatctggggctgggctgggccctacttaatggggcccgggtgtccgagagcgtgccgagcggagcgaagccaggagcccgatcgagatgatgatggttatgcagcccgagggtctgggggccggggaggggcgctttgcgggcggcggcgggggcggcgagtacatggaacaggaggaggactgggaccgcgacctgctgctggacccggcctgggagaagcagcagcggaaaaccttcactgcctggtgcaactcacacctgcgcaaggcaggcacccagatcgagaacatcgaggaagatttccgcaatggcctcaaactcatgctgctcctggaggtcatttcaggtgagaggctgcctaggccagataaaggcaagatgcgcttccacaaaatcgccaacgttaacaaggccctggacttcattgccagcaagggggttaaactggtgtccattggtgctgaagagattgttgacgggaacctgaagatgaccctgggcatgatctggaccatcatccttcgcttcgccatccaggacatctctgtggaagaaacctcagccaaggaaggcttgcttctgtggtgccagaggaagacagcaccgtaccgcaacgtcaacgtgcagaacttccacaccagctggaaggatggcctggccctctgtgccctcatccaccgacaccgccctgacctcatcgactacgccaaactgcgaaaggatgaccccatcggaaacctgaacactgcctttgaggtggcagagaaatacctggacatccccaagatgttggatgcagaagacattgtgaacaccccaaagccggatgagaaggccatcatgacctatgtgtcctgcttctaccatgcctttgccggggctgagcaggcagagacagctgccaacaggatctgcaaggtgctggcagtgaaccaggaaaacgagaagctgatggaggagtatgagaagcttgccagtgagctgctggagtggatccgccgcactgtcccatggctggagaaccgtgtgggtgagcccagcatgagtgccatgcagcgcaaactagaggactttcgggactaccggcgtctgcacaagccgccccgcattcaggaaaagtgccagctggagatcaacttcaacacactgcagaccaagttgcggctcagccaccggcctgccttcatgccctccgagggcaagctggtctcggacatcgccaacgcctggcgggggctggagcaggtggaaaagggctatgaggactggctgctctcggagatccggcgcctgcagcgactccagcacctggctgagaagttccggcagaaggcctccctgcacgaagcctggacccggggaaaggaggagatgctgagccagcgcgactacgattcggctttgctacaggaggtgcgggcgttgctgcggcgccacgaggcctttgagagcgacctggcggcgcaccaggaccgcgtggagcacattgccgcgctggcccaggagctcaatgagctggactaccacgaggcagcctcagtgaatagccgctgccaggccatctgcgatcagtgggacaacctgggcaccctgacccagaagaggcgggatgcgctagagcggatggagaagctcctggagaccattgaccggctgcaactggagtttgcccggcgggccgcgcccttcaacaactggctggatggtgccgtggaggacctgcaggacgtgtggctggtacactctgtggaggagacccagagcctgctgacagcgcacgatcagttcaaggcaacactgcccgaggctgactgagagcgaggtgccatcatgggcatccagggtgagatccagaagatctgccagacgtatgggctgcggccctgctccaccaatccctacatcaccctcagcccgcaggacatcaacaccaagtgggatatggtccgaaagctggtgcccagctgtgaccagacactgcaggaggagctggcacggcagcaggtaaacgagaggctccggcgacagtttgcggcccaggccaatgccattggaccctggatccaggcgaaggtggaggaagtggggcggctggcagcagggctagctggctctctggaggagcagatggctgggctacggcagcaggagcagaacattatcaactacaagactaacattgaccggctggagggtgaccaccagctgctgcaggagagcctggtgttcgacaataagcacaccgtctacagcatggagcacatccgcgtgggctgggagcagctgctcacctccattgcccgcaccatcaatgaagtggagaaccaggtactgacccgagacgccaagggactgagccaggagcagctcaacgagttccgagcatccttcaaccactttgacaggaagcagaatgggatgatggagcctgatgacttccgagcttgcctcatctccatgggctatgacctgggggaagtggagtttgctcgcatcatgaccatggtggaccccaacgcagctggggtggtgaccttccaggccttcatagacttcatgacccgagagacagccgagactgacacgactgagcaagttgtagcttccttcaagatcttggcaggagacaagaactacatcacccccgaggagctgcggcgcgagctccctgccaagcaggccgagtactgcatccgccgtatggtgccctacaagggatccggggccccggctggagccctggactacgtggccttctccagtgccctctatggggagagcgacctttgaccccaaccactgaggttctctatgcaagatggagagaggatgcaccctgtggctgatcccatccgtccctcggagcaagggcctaagagaaaagccagccaagtgcttctgaataaagatccctctctgggtctct

SEQ ID NO: 8551 - DNA, 652 bp, Homo sapiens
atggggaatttggcatattctgtgtaatatcagccattttttagccttaaaggtcaaaggaatagacccggcatgttagttctaactcccactcgggaattagcacttcaagtagaaggagaatgttgcaaatattcatataaagggcttcggagtgtttgtgtatatggtggtggaaatagagatgaacaaatagaagagcttaaaaaaggtgtagatatcataattgcaactcccggaagattgaatgatctgcaaatgagtaacttcgtcaatctgaagaatataacctacttggttttagatgaagcagacaagatgttggacatgggatttgaaccccagataatgaagattttgttagatgtgcgcccagataggcagacagttatgaccagtgctacatggcctcattcagttcatcgcctcgcacaatcttatttgaaagaaccaatgattgtctatgttggtacattggatctagttgctgtaagttcagtgaagcaaaatataattgtaaccaccgaggaagagaaatggagtcacatgcaaacttttctacagagtatgtcatccacagacaaagtcattgtcttcgtttctcgaaaagctgttgcggatcacttatcaagtgacctaatacttggaaata

SEQ ID NO: 8552 - DNA, 477 bp, Homo sapiens
gttttccgaggccgttgcgtccgggtaggttcctggatgaccatcctggctggctcaaaattccctctagattacctgcgaccacccccaggaacccggagactgaaactccttttctcacctgcgcaggtggcctcgaggtggtggcagggccgccccctgcagtccggagacgaacgcacggaccgggcctccggaggcaggttcggctggaaggaaccgctctcgcttcgtcctacacttgcgcaaatgtctccggcttgctccacttatcgggctcaccaaatacagctgcagtatgaattccatcttctacacaacagtaaaccagaatgttcatgttcacagcgttcatctcccatcctgttgtctaacgcacatggtttttttaaacttttctaagattgcatgagattctgcaacacaactgattataaaaacacttgaagtttttacctttttttttactttccaact

SEQ ID NO: 8553 - DNA, 499 bp, Homo sapiens
atctgtttacagtggaaagtcaagaatgagaccactggaaggctagcaaaataggcccaatccccaaatccaaaccttgggctaagacaaaattaggagtctgctattaataggatcttttggtgtcctaggcagcctctctctaagagcattagctgtgcctgggtgttaatctcttggcatgagtttagtggaaaatgtaatctcctctggcaaaactgcaagagcaagctttatgcggttagcaaaagtgatctgtgattgtctgtcttctgaggatgctacacaacgcctgcacagacaaggagttgcggaaccttgcctcccggctgaaggattggtttggagctctccacgaggatgcgaacagagtcatcaagcccaccagctccaacacagcccaaggcaggtttgacactagcatcctgcccatctgcaaggactccctgggctggatgttcaacaagttggacatgaactatgacctcctgcttgaccc

SEQ ID NO: 8554 - DNA, 1508 bp, Homo sapiens
cgacagcaaagttgtgaaaacaagagcagaaggcgaatggctctccttcgatgtaactgatgctgttcatgaatggcttcaccataaaggttacaagccactctctcttttcctcccaagatgttcaacaggaacctgggatttaaaataagcttacactgtccctgctgcacttttgtaccatctaataattacatcatcccaaataaaagtgaagaactagaagcaagatttgcaggtattgatggcacctccacatataccagtggtgatcagaaaactataaagtccactaggaaaaaaaacagtgggaagaccccacatctcctgctaatgttattgccctcctacagacttgagtcacaacagaccaaccggcggaagaagcgtgctttggatgcggcctattgctttagaaatgtgcaggataattgctgcctacgtccactttacattgatttcaagagggatctagggtggaaatggatacacgaacccaaagggtacaatgccaacttctgtgctggagcatgcccgtatttatggagttcagacactcagcacagcagggtcctgagcttatataataccataaatccagaagcatctgcttctccttgctgcgtgtcccaagatttagaacctctaaccattctctactacattggcaaaacacccaagattgaacagctttctaatatgattgtaaagtcttgcaaatgcagctaaaattcttggaaaagtggcaagaccaaaatgacaatgatgatgataatgatgatgacgacgacaacgatgatgcttgtaacaagaaaacataagagagccttggttcatcagtgttaaaaaatttttgaaaaggcggtactagttcagacactttggaagtttgtgttctgtttgttaaaactggcatctgacacaaaaaaagttgaaggccttattctacatttcacctactttgtaagtgagagagacaagaagcaaattttttttaaagaaaaaaataaacactggaagaatttattagtgttaattatgtgaacaacgacaacaacaacaacaacaacaaacaggaaaatcccattaagtggagttgctgtacgtaccgttcctatcccgcgcctcacttgatttttctgtattgctatgcaataggcacccttcccattcttactcttagagttaacagtgagttatttattgtgtgttactatataatgaacgtttcattgcccttggaaaataaaacaggtgtataaagtggagaccaaatactttgccagaaactcatggatggcttaaggaacttgaactcaaacgagccagaaaaaaagaggtcatattaatgggatgaaaacccaagtgagttattatatgaccgagaaagtctgcattaagataaagaccctgaaaacacatgttatgtatcagctgcctaaggaagcttcttgtaaggtccaaaaactaaaaagactgttaataaaagaaactttcagtcagaataa

SEQ ID NO: 8555 - DNA, 2900 bp, Homo sapiens
tcctctggctccagccaagcgtcctatccggagccaactgtagctgggatccagcgagaggaagatgctcaaggtgtcagccgtactgtgtgtgtgtgcagccgcttggtgcagtcagtctctcgcagctgccgcggcggtggctgcagccggggggcggtcggacggcggtaattttctggatgataaacaatggctcaccacaatctctcagtatgacaaggaagtcggacagtggaacaaattccgagacgatgattatttccgcacttggagtccaggaaaacccttcgatcaggctttagatccagctaaggatccatgcttaaagatgaaatgtagtcgccataaagtatgcattgctcaagattctcagactgcagtctgcattagtcaccggaggcttacacacaggatgaaagaagcaggagtagaccataggcagtggaggggtcccatattatccacctgcaagcagtgcccagtggtctatcccagccctgtttgtggttcagatggtcatacctactcttttcagtgcaaactagaatatcaggcatgtgtcttaggaaaacagatctcagtcaaatgtgaaggacattgcccatgtccttcagataagcccaccagtacaagcagaaatgttaagagagcatgcagtgacctggagttcagggaagtggcaaacagattgcgggactggttcaaggcccttcatgaaagtggaagtcaaaacaagaagacaaaaacattgctgaggcctgagagaagcagattcgataccagcatcttgccaatttgcaaggactcacttggctggatgtttaacagacttgatacaaactatgacctgctattggaccagtcagagctcagaagcatttaccttgataagaatgaacagtgtaccaaggcattcttcaattcttgtgacacatacaaggacagtttaatatctaataatgagtggtgctactgcttccagagacagcaagacccaccttgccagactgagctcagcaatattcagaagcggcaaggggtaaagaagctcctaggacagtatatccccctgtgtgatgaagatggttactacaagccaacacaatgtcatggcagtgttggacagtgctggtgtgttgacagatatggaaatgaagtcatgggatccagaataaatggtgttgcagattgtgctatagattttgagatctccggagattttgctagtggcgattttcatgaatggactgatgatgaggatgatgaagacgatattatgaatgatgaagatgaaattgaagatgatgatgaagatgaaggggatgatgatgatggtggtgatgaccatgatgtatacatttgattgatgacagttgaaatcaataaattctacatttctaatatttacaaaaatgatagcctatttaaaattatcttcttccccaataacaaaatgattctaaacctcacatatattttgtataattatttgaaaaattgcagctaaagttatagaactttatgtttaaataagaatcatttgctttgagtttttatattccttacacaaaaagaaaatacatatgcagtctagtcagacaaaataaagttttgaagtgctactataataagtttttcacgagaacaaactttgtaaatcttccataagcaaaatgacagctagtgcttgggatcgtacatgttaattttctgaaagataattctaagtgaaatttaaaataaataaatttttaatgacctgggtcttaaggatttaggaaaaatatgcatgctttaattgcatttccaaagtagcatcttgctagacctagttgagtcaggataacagagagataccacatggcaagaaaaacaaagtgacaattgtagagtcctcaattgtgtttacattaatagtggtgtttttacctatgaaattattctggatctaataggacattttacaaaatggcaagtatggaaaaccatggattctgaaagttaaaaatttagttgttctccccaatgtgtattttaatttggatggcagtctcatgcagattttttaaaagattctttaataacatgatttgtttgcctttctagatttctttatctttctgaccagcaacttagggagcagaatttaaattaggaagacaaagggaaagattcatttaaaccatatttttacaaagtttgtcatttgccccaaggtcaaattttaaattcttaattttcattttatttcccattttaggtaaaagtttgcatttaatcttagaattatgttatttttgttagtagtgtggaaacttagagaacttattgtatggtgccttgcaaaaatagagatagaaagattttagcatgcataccaatatagtatattacgcaatatataagcacacctaattaacagattaatatcagtaaaggtattgctgctggaatgaagaaaatgggatacgtttgtttctttttttctattgttacataattgccatgtggacttgtttatgattattgtgtagagtagcatttaagatttaactgtagcaaaaattactttaaccgctgtatttaagttagcatgttaattaattgtgtagacattttggcacaccatcacttttaactatatcataccaatggttttgtgcccataataaaaatggaaaaacctgttgaatgttacgtattggtatctttaatttcaacagtgggtaaactggtttcccagtatacaattcattgaaagcaaaattgattaattatttccatttaatttatacacactcaatacaaaatttaatgttgactttacgtaataaagtataatgcattttcttttttactgtttatgtatagtttacaaaataaagaatcttgtaacc

SEQ ID NO: 8556 - DNA, 758 bp, Homo sapiens
taattttagtagagacggggtttcgccatgttgaccaggctggtctcgaactcgagacctcatgtgatccgcccgccttggcctcccaaagtgctgggaatacaggctgtttagcttttgatagagaaaaatccccctctgctaaagtgctgccaggtgtacttacctgtaatccccaaaatgacctcctggagtgaagcaatcaaagccaagaagggagcgccgagaaaacagaagttgccaatcagaactgccctcgctgagatgcccggttacagtcattagtagtaataatgggcttttcttcctccagttttccttccagcagggtggatggggagcatcgctggctgacaggctggtcagaaaatgtgatgttctgaatcgtggattttcaggttacaataccaggtgggccaaaattatccttccaagattaatcaggaaaggaaacagtttggacatcccagtagcagttacaattttctttggggccaatgacagtgcactaaaagatgagaatcccaagcagcacattcccctggaggagtacgctgcgaacctaaagagcatggtgcagtacctgaagtccgtggacatccctgagaatcgagtcattctcatcacgccgaccccactttgtgaaacagcctgggaagaacagtgcatcatacaaggttgcaaactaaatcgcctgaactctgttgttggtgaatatgccaatgcgtgtttacaagtggcccaagactgtgggactg

SEQ ID NO: 8557 - DNA, 543 bp, Homo sapiens
agggagggaatgggaggacgcttgcgggatagggaggcgggggctggaaattggcagggtgagagctggggaaactagtctgggacgcagccctccttgtcccccttcttcattcacccccttgttgaggcccttggcttttgcataatacaccctttaaaaaaatgtatttaaagaggctggttcctatccatccgactggaggcatctcagtgcaagagcaaagctaagtcctgcacacgctcctcccctcctcctcctccttctccccccaggttttcccgaatgtatctactccggttacaactagacgcggcccctcccccacctgcctccccccttccttccctcgatcgtggagggagcgttctctgtgccttcccaagtccccgtgggggaccttctatgttggagtggggggagggggggagggtcatataacgaaggccagaaagaacaaattagataatcaaaagaattatagtaattgctttcactttcccccgcccgctcagcggattccctcccccgcccctcccctgg

SEQ ID NO: 8558 - DNA, 1943 bp, Homo sapiens
tttgagagtttaaaatatttataatttttttataactgctcaacacatctccatgttctgcttgtgttcattgtgcaggggaaatgccgggagtacagacgacgtcaccgtatatcttcttttcggccagtggaggatatcaccgaagaggacttagaaaatgttgccataactgttcgagataaaatctatgataaagttctgggtaacacgtgccatcagtgtcgacaaaagaccatcgacaccaagacagtgtgtcggaaccagggttgctgtggtgtgcgaggacagttctgtggaccatgcctgcggaaccgctatggggaggatgtcagatcggcattgctggacccggattgggtgtgtcccccctgtcgtgggatctgcaattgcagctactgtcggaagcgtgacggccgctgtgccacaggaatcctcattcatctggccaagttttatggttatgacaatgttaaggaatatctggagagcttacaaaaggagctggtagaagacaattaagaggaaaacaaacagaaccagccacctcaccatagagtactccaacaagacatgcataccattggtgcctaagaaagatttttttacagttgtgtttttatacagaaattctttgtagaaattactattttttgttaaagattgtttatatgcttacaaagatttctcaggaagacagcagagcagaggaatctatatagatgtatgcacagacctgtctgtatgctgaactttgttaaaaatatctgccagttattaaaaagcacagtttaaatggggtggggttaaagttcaggtaagtaagttagagagaaaacattgtatgatcagctcctgcacttgatctatctatctttggcttcccaaacagtaactcactccaggccaagtgtgccttagcacgagtgaccacagtttaatagaccacacacatcgtttaacctgctcttggtcattggaaatttacactgaacaaagtgcaattaactgtagaacagttttatttttattaaaacttgactgaacaaaaggggaccatcaacattgtagacactggacactggaggccttacagagtgctagcctcttccttcaggactcacctggggcctgctgcttttatattttgaaagagtttaagggctaataatttaatttgttgtttgttaaaaattaaaatctccgttctttccggctgcattgcttttgcatgttcacatatgatgtacttttatgatgtacttttttttttttgagatggagtcttgttctgttgcccaggagggagtgcagtggtgcaacctcggctcactgcaacctttgcctcctaggttcaagtgattctcctacctcctgagtaactgggattacagtcgtgtgccaccacgctcagccctgagttagtttctagtatttttttctgactttcactctaaggatagcgttgaaaaaagaatgcacgtgtgagttactaaaaagttagaataatgtgcatgggaacagtgcagcaacatgctagaaaatcctcactgcactccagcagaggctagaggaatgccagtgttaccttacgcttctagaagcagagccactccagccagaacccattttgcagtcttctcttcgctcttcagcctgaaggtccagatgtagctggggcctctcagtttggttctatacacagggcactcgtaggtctgtttggtttcttgtctgtccacgggggtggcttttgcaaagatgaccggcatagggcatgccagctccttgagacgggcttcaacaatggttcctgcttgggtgtcccagcgggcgcctatggcaaaaacacagcggttgcaattgtgtggcagcttgctactaatgataatgatcaagtaagttgtttgatgcaataaacattcaacattctggttttgtca

SEQ ID NO: 8559 - DNA, 351 bp, Homo sapiens
tgccatgctcctgggagctgattcagtctgtggtaccacccacatcctcacctaggcagcaccaaccctatgttctcttgctgtatgttctcttgtcccattttcaacagtactgcctgggggctgcctcgcctgtgacaaccatgccctccaggaagctcacctgtgcctgaagcgccattatgctgcctttccattacctagcagaacctccttcaatgactccctcacattcttagagaatgctgcagacgttggggggctagccatcgcgctgcaggcatacagcaagaggctgttacggcaccatggggagactgtcctgcccagcctggacctcagcccccagca

SEQ ID NO: 8560 - DNA, 4838 bp, Homo sapiens
gtttcagatttgggatattggtgtttctgttttggagaaattattctttttctttttaatttgaagaaaaatcatcagtcttggaatacagaagagaaactagaaatatacgtattttgtttcacatttgaacagtcattcttgaggaatactccatacctgagtagacagccatgtggccatcgcagctactaattttcatgatgctcttagctccaataattcatgctttcagccgtgccccaattccaatggctgtggtccgcagagagctatcctgtgagagctatcctatagagcttcgctgtccaggaacagacgtcatcatgatagaaagtgccaactatggcaggactgatgacaaaatttgtgactctgaccctgctcagatggagaatatccgatgttatctgccagatgcctataagattatgtctcaaagatgcaataacagaacccagtgtgcagtggtggcaggtcctgatgtttttccagacccgtgtccaggaacctataaataccttgaagtgcagtatgaatgtgtcccttacaaagtggaacaaaaagtttttctttgtcctggactactaaaaggagtataccagagtgaacatttgtttgagtccgaccaccaatctggggcgtggtgcaaagaccctctgcaggcatctgacaagatttattatatgccctggactccctacagaactgataccctgactgagtattcatccaaggatgacttcattgctggaagaccaactacaacctacaagctccctcacagggtggatggcacaggatttgtagtgtatgatggagctttgttcttcaacaaagagcgcaccaggaacatagtaaagtttgatttgcggactaggataaagagtggagaggctatcatagcaaatgccaattaccatgatacctccccttaccgatggggaggcaaatctgacatagacctggcagtagatgagaatgggctatgggtaatctatgcaacagaacaaaacaatggtaaaattgtcattagtcaattgaacccttacaccctacggatcgaaggaacatgggatactgcatatgataaaaggtcagcttccaatgcctttatgatttgtggaattctgtatgtggtcaaatctgtatatgaggatgatgacaatgaggctactggaaataagattgactacatttacaacactgaccaaagcaaggatagtttggtggatgtaccctttcctaattcataccagtacattgcagctgtggattacaaccccagggacaacctactttatgtatggaataactatcacgtcgtgaaatattctttggattttggacctctggatagtagatcagggcaggcacatcatggacaagtttcatacatttctccgccaattcaccttgactctgagctagaaagaccctctgttaaagatatctctaccacaggacctcttggcatgggaagcactaccaccagtaccacccttcggaccacaactttgagcccaggaaggagtaccaccccgtcagtgtcaggaagaagaaaccggagtactagtaccccatctccagctgtcgaggtacttgatgacatgaccacacaccttccatcagcatcgtcccaaatcccagctctcgaagagagctgtgaggctgtggaagcccgagaaatcatgtggtttaagactcgtcaaggacagatagcaaagcagccatgccctgcaggaactataggtgtatcaacttatctatgccttgctcctgatggaatttgggatccccaaggtccagatctcagcaactgttcttctccttgggtcaatcatataacacagaagttgaaatctggtgaaacagctgccaacattgctagagagctggctgaacagacaagaaatcacttgaatgctggggacatcacctactctgtccgggccatggaccagctggtaggcctcctagatgtacagcttcggaacttgaccccaggtggaaaagatagtgctgcccggagtttgaacaagcttcagaaaagagagcgctcttgcagagcctatgtccaggcaatggtcgagacagttaacaacctccttcagccacaagctttgaatgcatggagagacctgactacgagtgatcagctgcgtgcggccaccatgttgcttcatactgtggaggaaagtgcttttgtgctggctgataaccttttgaagactgacattgtcagggagaatacagacaatattaaattggaagttgcaagactgagcacagaaggaaacttagaagacctaaaatttccagaaaacatgggccatggaagcactatccagctgtctgcaaataccttaaagcaaaatggccgaaatggagagatcagagtggcctttgtcctgtataacaacttgggtccttatttatccacggagaatgccagtatgaagttgggaacggaagctttgtccacaaatcattctgttattgtcaattcccctgttattacggcagcaataaacaaagagttcagtaacaaggtttatttggctgatcctgtggtatttactgttaaacatatcaagcagtcagaggaaaatttcaaccctaactgttcattttggagctactccaagcgtacaatgacaggttattggtcaacacaaggctgtcggctcctgacaacaaataagacacatactacatgctcttgtaaccacctaacaaattttgcagtactgatggcacatgtggaagttaagcacagtgatgcggtccatgacctccttctggatgtgatcacgtgggttggaattttgctgtcccttgtttgtctcctgatttgcatcttcacattttgctttttccgggggctccagagtgaccgtaacaccatccacaagaacctctgcatcagtctctttgtagcagagctgctcttcctgattgggatcaaccgaactgaccaaccaattgcctgtgctgttttcgctgccctgttacatttcttcttcttggctgccttcacctggatgttcctggagggggtgcagctttatatcatgctggtggaggtttttgagagtgaacattcacgtaggaaatacttttatctggtcggctatgggatgcctgcactcattgtggctgtgtcagctgcagtagactacaggagttatggaacagataaagtatgttggctccgacttgacacctacttcatttggagttttataggaccagcaactttgataattatgcttaatgtaatcttccttgggattgctttatataaaatgtttcatcatactgctatactgaaacctgaatcaggctgtcttgataacatcaagtcatgggttataggtgcaatagctcttctctgcctattaggattgacctgggcctttggactcatgtatattaatgaaagcacagtcatcatggcctatctcttcaccattttcaattctctacagggaatgtttatatttattttccattgtgtcctacagaagaaggtacgaaaagagtatgggaaatgcctgcgaacacattgctgtagtggcaaaagtacagagagttccattggttcagggaaaacatctggttctcgaactcctggacgctactccacaggctcacagagccgaatccgtagaatgtggaatgacacggttcgaaagcagtcagagtcttcctttattactggagacataaacagttcagcgtcactcaacagagagccctacagagagacaagtatgggagtaaagctaaacattgcatatcaaataggggcttctgaacaatgccagggatacaagtgtcatggatactctaccactgaatggtaaccatggcaatagttacagcattgccagcggcgaatacctgagcaactgtgtgcaaatcatagaccgtggctataaccataacgagaccgccctagagaaaaagattctgaaggaactcacttccaactatatcccttcttacctgaacaaccatgagcgctccagtgaacagaacaggaatctgatgaacaagctggtgaataaccttggcagtggaagggaagatgatgccattgtcctggatgatgccacctcgtttaaccacgaggagagtttgggcctggaactcattcatgaggaatctgatgctcctttgctgcccccaagagtatactccaccgagaaccaccagccacaccattataccagaaggcggatcccccaagaccacagtgagagctttttccctttgctaaccaacgagcacacagaagatctccagtcaccccatagagactctctctataccagcatgccgacactggctggtgtggccgccacagagagtgttaccaccagcacccagaccgaacccccaccggccaaatgtggtgatgccgaagatgtttactacaaaagcatgccaaacctaggctccagaaaccacgtccatcagctgcatacttactaccagctaggtcgcggcagcagtgatggatttatagttcctccaaacaaagatgggacccctcccgagggaagttcaaaaggaccggctcatttggtcactagtctatagaagatgacacagaaattggaaccaacaaaactgctaacaccttgttgactgttctgagttgatataagcagtggtaataatgtgtgtactcctaaatctttatgctgtcctctaaagacaaacacaaactctcagacttttttttttttaatgggatttttaggtcagcccaggggagaaagataactgctaaaattcccctgtaccccatcctttcttgtcctttcccc

SEQ ID NO: 8561 - DNA, 3566 bp, Homo sapiens; identical to SEQ ID NO: 4716

SEQ ID NO: 8562 - DNA, 532 bp, Homo sapiens
atttttcaaaaataggaactggggagaaggttggggtttcgtaccttctgacagagcgcttgtctttgtggataaccatgacaatcaacgaggacatggggctggaggagcctctattcttaccttctgggatgctaggctgtacaaaatggcagttggatttatgcttgctcatccttacggatttacacgagtaatgtcaagctaccgttggccaagacagtttcaaaatggaaacgatgttaatgattgggttgggccaccaaataataatggagtaattaaagaagttactattaatccagacactacttgtggcaatgactgggtctgtgaacatcgatggcgccaaataaggaacatggttattttccgcaatgtagtggatggccagccttttacaaattggtatgataatgggagcaaccaagtggcttttgggagaggaaacagaggattcattgttttcaacaatgatgactggtcattttctttaactttgcaaactggtcttcctgctggcacatactgt

SEQ ID NO: 8563 - DNA, 534 bp, Homo sapiens
gtcttcctggaccaaaagggatgaaaaagagctatcatgaggaacgagctctagtagagccatgtgtgtgaaagtgtgggtgtttgtataatgatgcaagagcatttcgtagcaggtggcatttttctgaagttgttcattaagacttcccagcattcctacagatataaataggtgaggccgcaggcggtgctctgggtccgggagcgctgtccccagcatgaacgcggccggcggcgggagtgaatgactgcagctgcgacttccttcccgggccgcccgagcctccttccccaccgactttcttgttttgattaactccgtggactcctgactctttcttcgcccggaacatcaatatgtgtcatgtcattgtcacctgtcgctcgatgctctggaccttgctgagtattgtggtggcttttgccgagctcattgccttcatgagtgcagactggctgatcgggaaagcgaggagccgcggcggcgtggagccggcgggcccgggcgggggctccccggagccctaccacc

SEQ ID NO: 8564 - DNA, 2306 bp, Homo sapiens
acggcccaatccatagattgtaggccccaacacccaggccgcgcattgggctgatgtataatatgcttttggcagagcttctataaggactcattatcaatttacatttagccaggaaagcatgaaaataagtacttcatgtaaagccattgtgcacatatttgttgctttaaaaaaaaaaaaagattcaattcattaggaaaagccagttctggccaaatattttgaatggcagccattgctatttttcatgttctccccttttgctttctctgtttccctggtttaaagtgtgcactctaataatttagaagatggcagaagcattcaagagcaggaccttctgagcagggcgaggctttgagttcggggcagttttcatggtagcatctgcctgtgctgaagcagaaaacagcatctgggacccccatgacttgggcactcttaggacagcccgcagatggttgcgtggggttcaggggcccttcccgcctggctcctcttgtctgcatcctgccctgtcagtgtggacctaggttcacactctgaggccctgcaaaacatgtcacctgtgggcacctccagttttccagtgcctggtccgcagctcgtctcggcagctgcatccttagggccattcccaaaacctcgggtcacggcgggggcctagggggacagcaaggcctttgccccttaagcctgatgaaaatttgtaggagagacttcagtgtccttatgaatttcagtgaagccgagtgggattaaggtgacagacagaagctctaagtgctttcttcagggagataaagcgctggcgagtgcatcatttaaaccgaagatggagtgagcgccaacaggcactggtggttgttgctgttctaatgggattgcttcgtagatggcccttcatggcggaacacgcgtgtgtcagtggggttcgggctgcgggtggcggctgagtgtccctgtgtgtctcttacaggaacagtgtgtggtggatgcagctctggagtacgttcccggcgctcaccagtttggtctcacacaaaacagccatttcatcttgccttttaatcagtcggctgtcagaaagaagctctcggttgagctaagcatccgcacgttcgcctccagcggcctgatttactacatggctcatcagaaccaagcagactacgctgtgctccagctgcacgggggccgcctccacttcatgtttgaccttggcaaaggcagaacaaaggtctctcaccctgcactgctcagtgatggcaagtggcacacggtcaagacagactatgttaaaagaaaaggcttcataactgtcgacggccgagagtctcccatggtgactgtggtgggagatggaaccatgctggatgtggagggtttgttctacctaggaggcctgccctcccagtaccaggccaggaaaattggaaatatcacccacagcatccctgcctgcattggggatgtgacggttaacagcaaacagctggacaaggacagcccggtgtctgccttcacggtgaacaggtgctacgcagtggcccaggaaggaacatactttgacggaagcggatatgcagctcttgtcaaagagggctacaaagtccagtcagatgtgaacatcacactggagtttcgaacctcctcgcagaatggcgtcctcctggggatcagcactgccaaagtggatgccattggactagagcttgtggacggcaaggtcttgttccatgtcaacaatggtgctggcaggataacagctgcatatgagcccaaaaccgccactgtgctctgtgatggaaaatggcacactcttcaagctaacaaaagcaaacaccgtatcactctgattgttgacgggaacgcagttggcgctgaaagtccacacacccagtctacctcagtggacaccaacaatcccatttatgttggtggctatcctgctggtgtgaagcaaaaatgcctgcgcagccagacctcgttccgcgggtgtttgaggaagctagctctgattaagagcccgcaggtgcagtcctttgacttcagcagagcgttcgaactgcacggagttttccttcattcctgtcctgggaccgagtcctgaacttcaagcagaatcctcagttggaatcattgctaatattttgaggagaagtgtatgtgtgaattaagaatctcttcagttcatatttcatttccaactcaggttaagtgtttctggggagagatgttgtgtttacgttacactaaaaccacatgtgcaacaaatacctccattaaatggtctaaaatgt

SEQ ID NO: 8565 - DNA, 732 bp, Homo sapiens
ccggagcggccggggccacgatggagcgcgacggctgcgcggggggcgggagccgcggcggcgagggcgggcgcgctccccgggagggcccggcggggaacggccgcgatcggggccgcagccacgctgccgaggcgcccggggacccgcaggcggccgcgtccttgctggcccctatggacgtgggggaggagccgctggagaaggcggcgcgcgcccgcactgccaaggaccccaacacctataaagtactctcgctggtattgtcagtatgtgtgttaacaacaatacttggttgtatatttgggttgaaaccaagctgtgccaaagaagttaaaagttgcaaaggtcgctgtttcgagagaacatttgggaactgtcgctgtgatgctgcctgtgttgagcttggaaactgctgtttagattaccaggagacgtgcatagaaccagaacatatatggacttgcaacaaattcaggtgtggtgagaaaaggttgaccagaagcctctgtgcctgttcagatgactgcaaggacaagggcgactgctgcatcaactacagttctgtgtgtcaaggtcaggtgctcgttgggctctgcagcagcctggtatcttccagcgtcttagcggggctttacataggtgttatcttttatattaggagtcatggctattggccaactatattagctgaaaaaaataattttaaaactttttattaaagaaactttt

SEQ ID NO: 8566 - DNA, 2144 bp, Homo sapiens
gggcagttgggattctccgtacgcctcggaaacagcagcccaaacctcacaacgcagaaccacgagatagtggggattgcagagccctgcgcaagagaaggaaaattaagacgcagcggagcccaggaggtgcccgcacgcgggaaggactggcgtgcagacgaggcagggggaggtttgcactcggcgtggcgcgggtgagccgcgtgctctcgggcacccggccgccagttcggatgcttccgatcctcggggagccggggcgctgcgccggagtcacttcagcccatgttgttcaggtgacacccggggaagagcagactccagtgtgcaaaacgtttcggggtttccgggccagcggttccgggcgcgcctcgcgggcggcggcgcagaactacaacccccaggctccctggcgtggcggcacgtgggcccgagccgggcggccgcggatataaagcgcggcggcggctgccgggcggagcggctgcacggacaagagcggaggcctggaaggggaaactgaagcagaaagaggttacttaatgggctcaaggtcacctacctgacctaccagcagctcaatggccttcccaaagaagaaacttcagggtcttgtggctgcaaccatcacgccaatgactgagaatggagaaatcaacttttcagtaattggtcagtatgtggattatcttgtgaaagaacagggagtgaagaacatttttgtgaatggcacaacaggagaaggcctgtccctgagcgtctcagagcgtcgccaggttgcagaggagtgggtgacaaaagggaaggacaagctggatcaggtgataattcacgtaggagcactgagcttgaaggagtcacaggaactggcccaacatgcagcagaaataggagctgatggcatcgctgtcattgcaccgttcttcctcaagccatggaccaaagatatcctgattaatttcctaaaggaagtggctgctgccgcccctgccctgccattttattactatcacattcctgccttgacaggggtaaagattcgtgctgaggagttgttggatgggattctggataagatccccaccttccaagggctgaaattcagtgatacagatctcttagacttcgggcaatgtgttgatcagaatcgccagcaacagtttgctttcctttttggggtggatgagcaactgttgagtgctctggtgatgggagcaactggagcagtgggcagtacctataactacctgggaaaaaagacaaaccagatgttggaggcttttgaacaaaaggacttctctttagccctgaactatcagttttgtatccagagatttatcaactttgttgtcaaactagaaaactcaaaactcaaagtttcaaagaaccaaaggactcttcctctgggcaccacaaacttccccttcctccactgagaagactgtctctcccgcaggaccctgaattattgaaatcgaaggctgacttcctttctgcagtgagcccaggggctaatgttattatcctgtcacacttgcaactagtgacttttgtttagtgatagaagatttggggaggacccaaaggactcagaactttctctccatacctccttttactcttttctttctgtgtaatgtatcaacaactgtttaatctcccttctaacaaaccttgatataagctttctgatatcaaagtatattgacagttaacccttactgattttaaacttgactatccagtctgttaattacctaagattttgttttcatttcatctctaattgttttgatcattggcagagaaagagtatttgaaattcatatcagttttgctccttattttaatctctttgaattaaaaataaaactttttcaaaatggaaatttgaaattataagtagacttcaattatctttgctaatcctctctttaattagtcagctagttaaaagttgttatattcatatatcctcaaccctctttttgcctttgtagcttttaatttcctgaaagaagaaaatgagttgttcgtttttggttctgaggatgtgatatccgtacttactgatactaaagccaaatttaaattctaaaattaattcttgggtatccaataaacaaagaactatttttcta

SEQ ID NO: 8567 - DNA, 460 bp, Homo sapiens
tctggcaaccctatcttgactcatgttttctatcttttccccaggatgtgattgacgtcatgaaaaggagtgaaagctggacattgaagaagccaaaatctgtttccaagaaactaaagagtgtattccgagtaccagatctgagtgggatgctgcaagttcttaaagagctgacagatgtccagtactactgggtggacgtgatgctgaatccaggcagtgccacttcgaatgttgctatttctgtggatcagagacaagtgaaaactgtacgcacctgcacatttaagaattcaaatccatgtgatttttctgcttttggtgtcttcggctgccaatatttctcttcggggaaatattactgggaagtagatgtgtctggaaagattgcctggatcctgggcgtacacagtaaaataagtagtctgaataaaaggaagagctctgggtttgcttttga

SEQ ID NO: 8568 - DNA, 864 bp, Homo sapiens
gttgttgttgagctgcaagatgaagaggttgaccagcggggagagcaacccccggggcagctcagtgaccttgttgtggtccaggtagaggttgcttatggaaccacagagaacagtcccgtgacattcgcgcacttccctgaggacactgtggagcagaaggcagaaagcgtgggcagaattatgcctcacacggagagatgtcgccacaatgaatgagcagggcttctgcaagatcgtgggccgctctaaggatatgatcatccggggtggtgagaacatctaccccgcagagctcgaggacttctttcacacacacccgaaggtgcaggaagtgcaggtggtgggagtgaaggacgatcggatgggggaagagatttgtgcctgcattcggctgaaggacggggaggagaccacggtggaggagataaaagctttctgcaaagggaagatctctcacttcaagattccgaagtacatcgtgtttgtcacaaactaccccctcaccatttcaggaaagatccagaaattcaaacttcgagagcagatggaacgacatctaaatctgtgaataaagcagcaggcctgtcctggccggttggcttgactctctcctgtcagaatgcaacctggctttatgcacctagatgtccccagcacccagttctgagccaggcacatcaaatgtcaaggaattgactgaacgaactaagagctcctggatgggtccgggaactcgcctgggcacaaggtgccaaaaggcaggcagcctgcccaggccctccctcctgtccatcccccacattcccctgtctgtccttgtgatttggcataaagagcttctgttttctttggcttcttgct

SEQ ID NO: 8569 - DNA, 679 bp, Homo sapiens
tgtcgcccagcctgaagtgcagtcgtgtgtttcatgcgcgtccgtgtgaagagaccaccaaacaggctttgtgtatgatctcgtgaaatcttgagagaaactgaatgacgaatgaaactattgttcctgtttcacacagaagaaaactgaggttaaaaggggttggcactcatcatgagcccctgttctcattctgcaaatggtgaagctctctattgtcctgaccccacagttcctgtcccatgaccagggccagctcaccaaggagctgcagcagcatgtaaagtcagtgacatgcccatgcgagtacctgaggaaggttgatggacggatggctacatggatgtgatggagatggtttactatcgggaccttccgcaccctgctgatgttttgttgcttaggatatgaatggctgagcggaggctgtaaaacctggcactctgcttgggttatcaatactctggctgaccatcatcatcgtgggactgactttggtggaagtccttggttacatgtcattattgcgtttccgacaagttataaagttgtcattaccctctggatagtttacctttgggtgtctctcctgaagactatcttctggtctcgaaatggacatgatggatccacggatgtacagcagagagcctggaggtccaaccgccgtagacaggaa

SEQ ID NO: 8570 - DNA, 584 bp, Homo sapiens
aaggaagatttcagtgaacagacacatattcacctcagcctttttgtgaattctgaactctttcaagatctaagtcaattacaggaaacatggcttgcagaagctcaggtacctgacaatgatgagcagtttgtaccagactatcaggctgaaagtttggcttttcatggcctgccactgaaaatcaagaaagaaccccacagtccatgttcagaaatcagctctgcctgcagtcaagaacagccctttaaattcagctatggagaaaagtgcctgtacaatgtcagtgcctatgatcagaagccacaagtgggaatgaggccctccaacccccccacaccatccagcacgccagtgtccccactgcatcatgcatctccaaactcaactcatacaccgaaacctgaccgggccttcccagctcacctccctccatcgcagtccataccagatagcagctaccccatggaccacagatttcgccgccagctttctgaaccctgtaactcctttcctcctttgccgacgatgccaagggaaggacgtcctatgtaccaacgccagatgtctgagccaaacatccc

SEQ ID NO: 8571 - DNA, 4731 bp, Homo sapiens
atgtggccatcgcagctactaattttcatgatgctcttagctccaataattcatgctttcagccgtgccccaattccaatggctgtggtccgcagagagctatcctgtgagagctatcctatagagcttcgctgtccaggaacagacgtcatcatgatagaaagtgccaactatggcaggactgatgacaaaatttgtgactctgaccctgctcagatggagaatatccgatgttatctgccagatgcctataagattatgtctcaaagatgcaataacagaacccagtgtgcagtggtggcaggtcctgatgtttttccagacccgtgtccaggaacctataaataccttgaagtgcagtatgaatgtgtcccttacaaagtggaacaaaaagtttttctttgtcctggactactaaaaggagtataccagagtgaacatttgtttgagtccgaccaccaatctggggcgtggtgcaaagaccctctgcaggcatctgacaagatttattatatgccctggactccctacagaactgataccctgactgagtattcatccaaggatgacttcattgctggaagaccaactacaacctacaagctccctcacagggtggatggcacaggatttgtagtgtatgatggagctttgttcttcaacaaagagcgcaccaggaacatagtaaagtttgatttgcggactaggataaagagtggagaggctatcatagcaaatgccaattaccatgatacctccccttaccgatggggaggcaaatctgacatagacctggcagtagatgagaatgggctatgggtaatctatgcaacagaacaaaacaatggtaaaattgtcattagtcaattgaacccttacaccctacggatcgaaggaacatgggatactgcatatgataaaaggtcagcttccaatgcctttatgatttgtggaattctgtatgtggtcaaatctgtatatgaggatgatgacaatgaggctactggaaataagattgactacatttacaacactgaccaaagcaaggatagtttggtggatgtaccctttcctaattcataccagtacattgcagctgtggattacaaccccagggacaacctactttatgtatggaataactatcacgtcgtgaaatattctttggattttggacctctggatagtagatcagggcaggcacatcatggacaagtttcatacatttctccgccaattcaccttgactctgagctagaaagaccctctgttaaagatatctctaccacaggacctcttggcatgggaagcactaccaccagtaccacccttcggaccacaactttgagcccaggaaggagtaccaccccgtcagtgtcaggaagaagaaaccggagtactagtaccccatctccagctgtcgaggtacttgatgacatgaccacacaccttccatcagcatcgtcccaaatcccagctctcgaagagagctgtgaggctgtggaagcccgagaaatcatgtggtttaagactcgtcaaggacagatagcaaagcagccatgccctgcaggaactataggtgtatcaacttatctatgccttgctcctgatggaatttgggatccccaaggtccagatctcagcaactgttcttctccttgggtcaatcatataacacagaagttgaaatctggtgaaacagctgccaacattgctagagagctggctgaacagacaagaaatcacttgaatgctggggacatcacctactctgtccgggccatggaccagctggtaggcctcctagatgtacagcttcggaacttgaccccaggtggaaaagatagtgctgcccggagtttgaacaagcttcagaaaagagagcgctcttgcagagcctatgtccaggcaatggtcgagacagttaacaacctccttcagccacaagctttgaatgcatggagagacctgactacgagtgatcagctgcgtgcggccaccatgttgcttcatactgtggaggaaagtgcttttgtgctggctgataaccttttgaagactgacattgtcagggagaatacagacaatattaaattggaagttgcaagactgagcacagaaggaaacttagaagacctaaaatttccagaaaacatgggccatggaagcactatccagctgtctgcaaataccttaaagcaaaatggccgaaatggagagatcagagtggcctttgtcctgtataacaacttgggtccttatttatccacggagaatgccagtatgaagttgggaacggaagctttgtccacaaatcattctgttattgtcaattcccctgttattacggcagcaataaacaaagagttcagtaacaaggtttatttggctgatcctgtggtatttactgttaaacatatcaagcagtcagaggaaaatttcaaccctaactgttcattttggagctactccaagcgtacaatgacaggttattggtcaacacaaggctgtcggctcctgacaacaaataagacacatactacatgctcttgtaaccacctaacaaattttgcagtactgatggcacatgtggaagttaagcacagtgatgcggtccatgacctccttctggatgtgatcacgtgggttggaattttgctgtcccttgtttgtctcctgatttgcatcttcacattttgctttttccgggggctccagagtgaccgtaacaccatccacaagaacctctgcatcagtctctttgtagcagagctgctcttcctgattgggatcaaccgaactgaccaaccaattgcctgtgctgttttcgctgccctgttacatttcttcttcttggctgccttcacctggatgttcctggagggggtgcagctttatatcatgctggtggaggtttttgagagtgaacattcacgtaggaaatacttttatctggtcggctatgggatgcctgcactcattgtggctgtgtcagctgcagtagactacaggagttatggaacagataaagtatgttggctccgacttgacacctacttcatttggagttttataggaccagcaactttgataattatgcttaatgtaatcttccttgggattgctttatataaaatgtttcatcatactgctatactgaaacctgaatcaggctgtcttgataacatcaagtcatgggttataggtgcaatagctcttctctgcctattaggattgacctgggcctttggactcatgtatattaatgaaagcacagtcatcatggcctatctcttcaccattttcaattctctacagggaatgtttatatttattttccattgtgtcctacagaagaaggtacgaaaagagtatgggaaatgcctgcgaacacattgctgtagtggcaaaagtacagagagttccattggttcagggaaaacatctggttctcgaactcctggacgctactccacaggctcacagagccgaatccgtagaatgtggaatgacacggttcgaaagcagtcagagtcttcctttattactggagacataaacagttcagcgtcactcaacagaggagccatggctaatcatcttataagcaatgctctgcttcgtccgcatggtactaacaatccctataatacattgcttggggaaccggcggtctgtaacaacccttctgtcagcatgtacaacgcacaagaggggcttctgaacaatgccagggatacaagtgtcatggatactctaccactgaatggtaaccatggcaatagttacagcattgccagcggcgaatacctgagcaactgtgtgcaaatcatagaccgtggctataaccataacgagaccgccctagagaaaaagattctgaaggaactcacttccaactatatcccttcttacctgaacaaccatgagcgctccagtgaacagaacaggaatctgatgaacaagctggtgaataaccttggcagtggaagggaagatgatgccattgtcctggatgatgccacctcgtttaaccacgaggagagtttgggcctggaactcattcatgaggaatctgatgctcctttgctgcccccaagagtatactccaccgagaaccaccagccacaccattataccagaaggcggatcccccaagaccacagtgagagctttttccctttgctaaccaacgagcacacagaagatctccagtcaccccatagagactctctctataccagcatgccgacactggctggtgtggccgccacagagagtgttaccaccagcacccagaccgaacccccaccggccaaatgtggtgatgccgaagatgtttactacaaaagcatgccaaacctaggctccagaaaccacgtccatcagctgcatacttactaccagctaggtcgcggcagcagtgatggatttatagttcctccaaacaaagatgggacccctcccgagggaagttcaaaaggaccggctcatttggtcactagtctatagaagatgacacagaaattggaaccaacaaaactgctaacaccttgttgactgttctgagttgatataagcagtggtaataatgtgtgtactcctaaatctttatgctgtcctctaaagacaaacacaaactctcagacttttttttttttaatgggatttttaggtcagcccaggggagaaagataactgctaaaattcccctgtaccccatcctttctt

SEQ ID NO: 8572 - DNA, 1222 bp, Homo sapiens
acacgttgtagacacggcagcctccagggacagtgtttcataaagccacacctgttgttgcgagtgagccagtcacctgacctgcagcaaagttctgagtgtgtgcatgaccacgcgcctggtttctgacaagcagttaagaacatctctgagtgtcctcagaaacacttgatgacgtcgtttctcctggcactgggaaacatctacaagtctggatacctgcccactatgtctatccgcaggcttttgtgcagccgggagtggtcattccacacgtccagccgacagcagctgccgcctccaccaccccttacattgattacactggagctgcatacgcacaatactcagcagctgctgctgctgccgccgccgctgctgcctatgaccagtacccctatgcagcctctccagctgctgcaggatatgttactgctgggggctatggctacgcagtccagcagccaatcaccgcagcggcacctgggacagctgccgccgccgctgcagcagctgctgccgctgcagcatttggccagtaccagcctcagcagctgcagacagaccgaatgcaatagaccagccatctgatcaaagttgaattgttttctctttccctcccaattttccaatttttagtagctaataagagagttaacattgacttaacagctttaaaaaaaaaaacagccatgctattgtgaagcagagttattattttttttatactccaggtagtgttctagatgagaaagaggtaagaatgaggggaatgggcacaattttggaaatcaatcccaaagagcctgagtaaatgaaaggccactacgaaatgacgccaggagtaacaacggaacttcacttttgtaacgggatttttatttttgctctttttatagtatcagggaagcaaactgccttttacaagttagaaaatgctgtttgaatctagttgaaccagggaatacagagcgagcaatatgtagcttgaattacatttaaaagcagattttttacaaacaaaatggcgaaagcactgattgtcatttttagcagtcacttaaggcctatagaacttttttcaagtcggaaggtcctgttcttactatctcaaaaatgggcatcgaacaatcaatctaggagcgtggcagtgggtaaaatggtggacaggcaccaaagctattttctcatctgtcctgtggatgagtggaactgtggaaca

SEQ ID NO: 8573 - DNA, 2905 bp, Homo sapiens
gatgctggaggttcgctagccgaagcggctgcatctggcgccgcgtctgccccgcgtgctcggagcggattctgcccgccgtccccggagccctcggcgccccgctgagcccgcgatcacttcctccctgtgaccaaccggcgctgcaggttagagcctggcaatgccgtttgggtgtgtgactctgggcgacaagaagaactataaccagccatcggaggtgactgacagatatgatttgggacaggtcatcaagactgaggagttttgtgaaatcttccgggccaaggacaagacgacaggcaagctgcacacctgcaagaagttccagaagcgggacggccgcaaggtgcggaaagctgccaagaacgagataggcatcctcaagatggtgaagcatcccaacatcctacagctggtggatgtgtttgtgacccgcaaggagtactttatcttcctggagctggccacggggagggaggtgtttgactggatcctggaccagggctactactcggagcgagacacaagcaacgtggtacggcaagtcctggaggccgtggcctatttgcactcactcaagatcgtgcacaggaatctcaagctggagaacctggtttactacaaccggctgaagaactcgaagattgtcatcagtgacttccatctggctaagctagaaaatggcctcatcaaggagccctgtgggacccccgagtatctggccccagaggtggtaggccggcagcggtatggacgccctgtggactgctgggccattggagtcatcatgtacatcctgctttcaggcaatccacctttctatgaggaggtggaagaagatgattatgagaaccatgataagaatctcttccgcaagatcctggctggtgactatgagtttgactctccatattgggatgatatttcgcaggcagccaaagacctggtcacaaggctgatggaggtggagcaagaccagcggatcactgcagaagaggccatctcccatgagtggatttctggcaatgctgcttctgataagaacatcaaggatggtgtctgtgcccagattgaaaagaactttgccagggccaagtggaagaaggctgtccgagtgaccaccctcatgaaacggctccgggcaccagagcagtccagcacggctgcagcccagtcggcctcagccacagacactgccacccccggggctgcagaccgtagtgccaccccagccacagatggaagtgccaccccagccactgatggcagtgtcaccccagccaccgatggaagcatcactccagccactgatgggagtgtcaccccagccactgacaggagcgctactccagccactgatgggagagccacaccagccacagaagagagcactgtgcccaccacccaaagcagtgccatgctggccaccaaggcagctgccacccctgagccggctatggcccagccggacagcacagccccagagggcgccacaggccaggctccaccctctagtaaaggggaagaggctgctggttatgcccaggagtctcaaagggaggaggccagctgagtaggcagcctggtgagggggggcaggggatgggcaggagggtgggagagtggatgaggggcttctcactgtacatagagtcactggcatgatgccctcgctcccccatgcccccacatcccagtggggcataactaggggtcacgggagagcagtctcgtctcctgtgtgtatgtgtgtgagtggtgggcaggccagtggcagggccggccccagcccctgcatggattccttgtggcttttctgtcttttgctagcttcaccagtttctgttccttgtgggatgctgctctagggatactcagggggctcctgctctccttccccttcccttcttgcctcaccattcccctaggcaggccctgcaggtcccacactctcccaggccctaaacttgggcggccttgccctgagagctggtcctccagcgaggccctgtcagcggtcttaggctcctgcacatgaaggtgtgtgcctgtggtgtgtgggctgctctaggagcagatacaggctggtatagaggatgcagaaaggtagggcagtatgtttaagtccagacttggcacatggctagggatactgctcactagctgtggaggtcctcaggagtggagagaatgagtaggagggcagaagcttccatttttgtccttcctaagaccctgttatttgtgttatttcctgcctttccgagtcctgcagtgggctgccctgtaccctgaacctcatgagcctctaagggaaaggaggaacaattaggacgtggcaatgagacctggcagggcagagtacaagcccagcacccagtgtcccagccttactgggtccttaccctgggccaaacagggagggctgatacctccttgctcttcctagatgcccacctcctacaatctcagcccacaagtcctctccaccctagggggcttgctgcatggcaataactcataatctgatttggaggtttgccctttacaggggcagattttctgctcagttcaacaatgaaatgaagaggaactccctctttctacagctcacttctatcagaggcccaggtgcctcagagccacattgagttgctttttctgggatgaggaagtagggttaaactccccagtttcctgagggaggctcctgacaggtgccctttgtcagaccctaccacagcctggataggcagccacattggtcctcgcccttgctcggcactccgtggtggtcctgcccttctccctgcatgcctgtgggtctgctctggtgtgtgaaggtcggtgggttaactgtgtgcctactgaacctggcaaataaacatcaccctgcaaagcc

SEQ ID NO: 8574 - DNA, 6767 bp, Homo sapiens
ttcttaagcggcggcggcagcagcagcagcaagagaaggagaagcagccccagctatgactgccgcatgttaatagctgccgctgggtccctcggctgctgctggagacagagcctgactccgaagttgtgcaactgtggactgggagagacatttgaaccctcttttcttttcgctccccttttgcccccttggggtgtgtgaagcgaggaacgtaaaggaaggcgaacatttggctctctttttccttcccctttctccgtggctgtgtagcggaagaaagggaagagagactttttgttgttgtttccttgactggggtctccaccctcctgctgctttctctgcgcttcgattctcgttatttgccgcgtgtggttgggggtgtctgcacaggggccggccggtcttttgccccgggctcaatggctggattgtggaaactgcacccgccttcaggttgttgagcaactgatgggacgatctcagggaccggcgtttacgaaagaaatgtttaatttggtaaattggaggaaaaaaacatggatttttagcaattgaagagcaaattaaggtttcagatttgggatattggtgtttctgttttggagaaattattctttttctttttaatttgaagaaaaatcatcagtcttggaatacagaagagaaactagaaatatacgtattttgtttcacatttgaacagtcattcttgaggaatactccatacctgagtagacagccatgtggccatcgcagctactaattttcatgatgctcttagctccaataattcatgctttcagccgtgccccaattccaatggctgtggtccgcagagagctatcctgtgagagctatcctatagagcttcgctgtccaggaacagacgtcatcatgatagaaagtgccaactatggcaggactgatgacaaaatttgtgactctgaccctgctcagatggagaatatccgatgttatctgccagatgcctataagattatgtctcaaagatgcaataacagaacccagtgtgcagtggtggcaggtcctgatgtttttccagacccgtgtccaggaacctataaataccttgaagtgcagtatgaatgtgtcccttacaaagtggaacaaaaagtttttctttgtcctggactactaaaaggagtataccagagtgaacatttgtttgagtccgaccaccaatctggggcgtggtgcaaagaccctctgcaggcatctgacaagatttattatatgccctggactccctacagaactgataccctgactgagtattcatccaaggatgacttcattgctggaagaccaactacaacctacaagctccctcacagggtggatggcacaggatttgtagtgtatgatggagctttgttcttcaacaaagagcgcaccaggaacatagtaaagtttgatttgcggactaggataaagagtggagaggctatcatagcaaatgccaattaccatgatacctccccttaccgatggggaggcaaatctgacatagacctggcagtagatgagaatgggctatgggtaatctatgcaacagaacaaaacaatggtaaaattgtcattagtcaattgaacccttacaccctacggatcgaaggaacatgggatactgcatatgataaaaggtcagcttccaatgcctttatgatttgtggaattctgtatgtggtcaaatctgtatatgaggatgatgacaatgaggctactggaaataagattgactacatttacaacactgaccaaagcaaggatagtttggtggatgtaccctttcctaattcataccagtacattgcagctgtggattacaaccccagggacaacctactttatgtatggaataactatcacgtcgtgaaatattctttggattttggacctctggatagtagatcagggcaggcacatcatggacaagtttcatacatttctccgccaattcaccttgactctgagctagaaagaccctctgttaaagatatctctaccacaggacctcttggcatgggaagcactaccaccagtaccacccttcggaccacaactttgagcccaggaaggagtaccaccccgtcagtgtcaggaagaagaaaccggagtactagtaccccatctccagctgtcgaggtacttgatgacatgaccacacaccttccatcagcatcgtcccaaatcccagctctcgaagagagctgtgaggctgtggaagcccgagaaatcatgtggtttaagactcgtcaaggacagatagcaaagcagccatgccctgcaggaactataggtgtatcaacttatctatgccttgctcctgatggaatttgggatccccaaggtccagatctcagcaactgttcttctccttgggtcaatcatataacacagaagttgaaatctggtgaaacagctgccaacattgctagagagctggctgaacagacaagaaatcacttgaatgctggggacatcacctactctgtccgggccatggaccagctggtaggcctcctagatgtacagcttcggaacttgaccccaggtggaaaagatagtgctgcccggagtttgaacaagcttcagaaaagagagcgctcttgcagagcctatgtccaggcaatggtcgagacagttaacaacctccttcagccacaagctttgaatgcatggagagacctgactacgagtgatcagctgcgtgcggccaccatgttgcttcatactgtggaggaaagtgcttttgtgctggctgataaccttttgaagactgacattgtcagggagaatacagacaatattaaattggaagttgcaagactgagcacagaaggaaacttagaagacctaaaatttccagaaaacatgggccatggaagcactatccagctgtctgcaaataccttaaagcaaaatggccgaaatggagagatcagagtggcctttgtcctgtataacaacttgggtccttatttatccacggagaatgccagtatgaagttgggaacggaagctttgtccacaaatcattctgttattgtcaattcccctgttattacggcagcaataaacaaagagttcagtaacaaggtttatttggctgatcctgtggtatttactgttaaacatatcaagcagtcagaggaaaatttcaaccctaactgttcattttggagctactccaagcgtacaatgacaggttattggtcaacacaaggctgtcggctcctgacaacaaataagacacatactacatgctcttgtaaccacctaacaaattttgcagtactgatggcacatgtggaagttaagcacagtgatgcggtccatgacctccttctggatgtgatcacgtgggttggaattttgctgtcccttgtttgtctcctgatttgcatcttcacattttgctttttccgggggctccagagtgaccgtaacaccatccacaagaacctctgcatcagtctctttgtagcagagctgctcttcctgattgggatcaaccgaactgaccaaccaattgcctgtgctgttttcgctgccctgttacatttcttcttcttggctgccttcacctggatgttcctggagggggtgcagctttatatcatgctggtggaggtttttgagagtgaacattcacgtaggaaatacttttatctggtcggctatgggatgcctgcactcattgtggctgtgtcagctgcagtagactacaggagttatggaacagataaagtatgttggctccgacttgacacctacttcatttggagttttataggaccagcaactttgataattatgcttaatgtaatcttccttgggattgctttatataaaatgtttcatcatactgctatactgaaacctgaatcaggctgtcttgataacatcaactatgaggataacagacccttcatcaagtcatgggttataggtgcaatagctcttctctgcctattaggattgacctgggcctttggactcatgtatattaatgaaagcacagtcatcatggcctatctcttcaccattttcaattctctacagggaatgtttatatttattttccattgtgtcctacagaagaaggtacgaaaagagtatgggaaatgcctgcgaacacattgctgtagtggcaaaagtacagagagttccattggttcagggaaaacatctggttctcgaactcctggacgctactccacaggctcacagagccgaatccgtagaatgtggaatgacacggttcgaaagcagtcagagtcttcctttattactggagacataaacagttcagcgtcactcaacagagagccctacagagagacaagtatgggagtaaagctaaacattgcatatcaaataggggcttctgaacaatgccagggatacaagtgtcatggatactctaccactgaatggtaaccatggcaatagttacagcattgccagcggcgaatacctgagcaactgtgtgcaaatcatagaccgtggctataaccataacgagaccgccctagagaaaaagattctgaaggaactcacttccaactatatcccttcttacctgaacaaccatgagcgctccagtgaacagaacaggaatctgatgaacaagctggtgaataaccttggcagtggaagggaagatgatgccattgtcctggatgatgccacctcgtttaaccacgaggagagtttgggcctggaactcattcatgaggaatctgatgctcctttgctgcccccaagagtatactccaccgagaaccaccagccacaccattataccagaaggcggatcccccaagaccacagtgagagctttttccctttgctaaccaacgagcacacagaagatctccagtcaccccatagagactctctctataccagcatgccgacactggctggtgtggccgccacagagagtgttaccaccagcacccagaccgaacccccaccggccaaatgtggtgatgccgaagatgtttactacaaaagcatgccaaacctaggctccagaaaccacgtccatcagctgcatacttactaccagctaggtcgcggcagcagtgatggatttatagttcctccaaacaaagatgggacccctcccgagggaagttcaaaaggaccggctcatttggtcactagtctatagaagatgacacagaaattggaaccaacaaaactgctaacaccttgttgactgttctgagttgatataagcagtggtaataatgtgtgtactcctaaatctttatgctgtcctctaaagacaaacacaaactctcagacttttttttttttaatgggatttttaggtcagcccaggggagaaagataactgctaaaattcccctgtaccccatcctttcttgtcctttccccttcagatggagacttcattatgttaatgaacaagatatgaagaaaatggcactcattgtggccttgttgaattatgttgtgtatgttttaacatctctgatgctgtgttactaaaattacaaggacctgctttttaaaaggccagaacaattgtctgaaattagtaacaatgctgcatctagattggagtgctgcacaaacaaacataagagcaaagcaaaactgtatcacatagggtttttggtcactcacaacctgaattcaccacagctggaatagctgtggaaaacaaaataaaacaacaaaattaataatgaaatggaggggaattctagaattatatgctaaatgcatattttatgatttgctgtattaactgatgataaaactaatggcagaaaaagaagttgagcaatttctatgtaatgtacagatactagcattgcacatatagtctgctttctgttcctccagaatttgagtcctgttaatgtagtagaaaaaaaaaaaagaaattttctttttcttttgtgctggtcttgcaagtttgtctaccagtaagagagcaaagtttccttcctttcttctctttcttcattttctttttttcttttttgccttttattcctttaaaatttcgcctggcaaaaaataaataaatggaactatcactttataagaatcattttctagtaatgcaaacaaattattttttacaaaaaaacaaaataaataaaattagacttccttccctcactatatatctttatgcagtcagaatatttccaacagtgttttttgcaaattagagcaggacaaacttttatgtttacagggcacgtctgttgtaatgcaaagcatatttggcaagcagttcatcaccaggacactagctatgattctagaagtcaaaaggtgtctatagaactagtggggcttctgcatgtgaaaaacggttttccataggcattaaagtgctgaatgctcagtctgatcaacaagtgggcacctgcactaccactttttagaggaaattcactccctcgtaagcattggaaggtcaaattattttgaagtgatttttttaaaaaaaagtcttctgtttattaacaggaaaatttatttatttgacaggattttgagtaatgtaggaatacaaaaggtaaattagcagcacatataatttttttttaatttatgatccattttgtatggtctcaaagttggatgacctcattactaatatttgttgtaaaagtgaaacttgtttgccaaccaataaacaactgattgagatttagaagatattgtattgatgtatgtactat

SEQ ID NO: 8575 - DNA, 1233 bp, Homo sapiens
ctggggagagtatatactgaatttagcttctgagacatgatgctcttcctttttaattaacccagaacttagcagcttatctatttctctaatctcaaaacatccttaaactgggggtgatacttgagtgagagaattttgcaggtattaaatgaactatcttcttttttttttttctttgagacagagtcttgctctgtcacccaggctggagtgcagtggcgtgatctcagctcactgcaacctccgcctcccgggttcaagtgattctcctgcctcagcctcctgagtagctgggattacagtcccaggacatcaaagctctgcagaaagaactcgagcaatttgccaagctcctgaagcagaagaggatcaccctgggatatacacaggccgatgtggggctcaccctgggggttctatttgggaaggtattcagccaaacgaccatctgccgctttgaggctctgcagcttagcttcaagaacatgtgtaagctgcggcccttgctgcagaagtgggtggaggaagctgacaacaatgaaaatcttcaggagatatgcaaagcagaaaccctcgtgcaggcccgaaagagaaagcgaaccagtatcgagaaccgagtgagaggcaacctggagaatttgttcctgcagtgcccgaaacccacactgcagcagatcagccacatcgcccagcagcttgggctcgagaaggatgtggtccgagtgtggttctgtaaccggcgccagaagggcaagcgatcaagcagcgactatgcacaacgagaggattttgaggctgctgggtctcctttctcagggggaccagtgtcctttcctctggccccagggccccattttggtaccccaggctatgggagccctcacttcactgcactgtactcctcggtccctttccctgagggggaagcctttccccctgtctccgtcaccactctgggctctcccatgcattcaaactgaggtgcctgcccttctaggaatgggggacagggggaggggaggagctagggaaagaaaacctggagtttgtgccagggtttttgggattaagttcttcattcactaaggaaggaattgggaacacaaagggtgggggcaggggagtttggggcaactggttggagggaaggtgaagttcaatgatgctcttgattttaatcccacatcatgtatcacttttttcttaaataaagaagcctgggacacagta

SEQ ID NO: 8576 - DNA, 1015 bp, Homo sapiens
acatcctgccccgcaaaaggcagcttcaccaaagtggggtatttccagcctttgtagctttcacttccacatctaccaagtgggcggagtggccttctgtggacgaatcagattcctctccagcaccgactttaagaggcgagccggggggtcagggtcccagatgcacaggaggagaagcaggagctgtcgggaagatcagaagccagtcatggatgaccagcgcgaccttatctccaacaatgagcaactgcccatgctgggccggcgccctggggccccggagagcaagtgcagccgcggagccctgtacacaggcttttccatcctggtgactctgctcctcgctggccaggccaccaccgcctacttcctgtaccagcagcagggccggctggacaaactgacagtcacctcccagaacctgcagctggagaacctgcgcatgaagcttcccaagcgtgcgtgcacccctacatcctgataccccccacctcccaccatccctcaactcagagacccgcatccctgcacccagctgggcccactgtcctctccctccggtttggaattccagcccttcctcatctgggtctgataccctcctccctgggcaccggggccacacttaccctcgttcctgtccccacagctcccaagcctgtgagcaagatgcgcatggccaccccgctgctgatgcaggcgctgcccatgggagccctgccccaggggcccatgcagaatgccaccaagtatggcaacatgacagaggaccatgtgatgcacctgctccaggtgagtgcagggagctagctgggtggtcctgcctgcccacccaggaccctggccgggccaagctccaaggcctgtatacctggctcatggcagactttcaacatgtgctctctggattactgaatacaagggtgacccttaaatgttatatgtagtctggcctctgcatttttgagataaacaggctcggctgggtgcagtggctcatgcctgtaatctc

SEQ ID NO: 8577 - DNA, 666 bp, Homo sapiens
tggcgctggtgaccggcgcggctcagggcataggcagagcctttgcagaggcgctgctgcttaagggcgccaaggtagcgctggtggattggaatcttgaagcaggtgtacagtgtaaagctgccctggatgagcagtttgaacctcagaagactctgttcatccagtgcgatgtggctgaccagcaacaactgagagacacttttagaaaagttgtagaccactttggaagactggacattttggtcaataatgctggagtgaataatgagaaaaactgggaaaaaactctgcaaattaatttggtttctgttatcagtggaacctatcttggtttggattacatgagtaagcaaaatggaggtgaaggcggcatcattatcaatatgtcatctttagcaggactcatgcccgttgcacagcagccggtttattgtgcttcaaagcatggcatagttggattcacacgctcagcagcggtgaggctacaacaaccgtcatatctcattttctctttgtacacatttataaaacatgaattctgtagagaggaatcacttgagaaatcacttggatgaaaggtggaaaaatgacatacctccatctcaattataaaaagttatcagatcacataaagaaccaaataaataatagatcatttttaaa

SEQ ID NO: 8578 - DNA, 799 bp, Homo sapiens
gtggatccgctgactgcagagaccctacctggcactctaagttggtgcgtcagcattttaggttgaaatgaatgaaaaatcaatcaggatgactgcagtggtagcgtgcacaactctaacctagtttgttcataattttcaactattcaccgtagacccaagcagtatgtaagatgtgaagaagattctttgggctataaagatgaagagtctacttcttctggtgctgatttcaatctgctgggctgatcatctttcagacaactatactctggatcatgacagagctattcacatccaagcagaaaatggcccccatctacttgtggaagcagagcaagccaaggtgttttcacacagaggtggcaatgttacactgccatgtaaattttatcgagaccctacagcatttggctcaggaatccataaaatccgaattaagtggaccaagctaacttcggattacctcaaggaagtggatgtttttgtttccatgggataccacaaaaaaacctatggaggctaccagggtagagtgtttctgaagggaggcagtgatagtgatgcttctctggtcatcacagacctcactctggaagattatgggagatataagtgtgaggtgattgaaggattagaagatgatactgttgtggtagcactggacttacaaggtgtggtattcccttactttccacgactggggcgctacaatctcaattttcacgaggcgcagcaggcgtgtctggaccaggatgctgtgatcgcctccttcgaccagctgtacgacgcctggcgg

SEQ ID NO: 8579 - DNA, 2173 bp, Homo sapiens
aaaaagcttcttccatatggagggaccgggtgcgctgggcgcggcgtcccctgcgttgtcctcctgctgccgcccccgcggccgccgctttctgccgcggggaccctgagccccggcccgccggtgtcagccgccgcgcgcgcgcacagacacacacacagagacacacaaacacacacagaaaagacacacacgcgcacacacggcgcgcacaccctcacgcccgccacagccacaacacgcccgcacgcgccctccctctccggcccgcaacttctcggtcctcggctcctttgttgctccagccgcggccgctcgcccgtgttgtgtgtccccggtgtcaccgagcgtgttgtgtgtccgtgcggcgcggcgctgtgtggctccctcgcgcccaccacgctggcccccgggccccggctcgcccttcccaggcgccggctgcagcagagtttcagaacaagcttcctggaacccatgacccatgaagtcttgtcgacatttataccgtctgagggtagcagctcgaaagtagaagaagtggagtgttgccagggacggcagtatctctttgtgtgaccctggcggcttatgggacgttggcttcagacctttgtgatacaccatgctgcgtgggacgatgacggcgtggagaggaatgaggcctgaggtcacactggcttgcctcctcctagccacagcaggctgctttgctgacttgaacgaggtccctcaggtcaccgtccagcctgcgtccaccgtccagaagcccggaggcactgtgatcttgggctgcgtggtggaacctccaaggatgaatgtaacctggcgcctgaatggaaaggagctgaatggctcggatgatgctctgggtgtcctcatcacccacgggaccctcgtcatcactgcccttaacaaccacactgtgggacggtaccagtgtgtggcccggatgcctgcgggggctgtggccagcgtgccagccactgtgacactagccagtgagtctgctcctttgcctccctgccatggtgcggtccctcctcatctctcccaccctgaagcccccaccattcatgctgcctcttgttactcttagcataaaatgggccttaactgcagaaatgtcaaatcagaacagtagctgcctagtaatgcccagtgatgggggacccttgtgcccttggaaaacctcactccaagtagaggctgtatctggagtgagtgtctacagagaggggaattggtcagtgcatggcagaacttgacatggcagaactgttccgtgggccccagagcagggccgtgccgtgccttcctacttggtcatcctgtggctgtaggtgcactgtcccaactgctcacacaccttccagtcccctccctccattctcaccacagttacagtcggagcagggagagacaggacaccaagagacatgggcagggccacgtgtagtctggacagagcccacccagcccagacttggcctcctgtctctctgtgaggggcaagcatagtccgaaggcctggattataaatattagaacataatgaaaaggaaactgtgtggcaaagggataaagggatacagagaaaagaaacaaggaagagatgaggtgacagtttggaccaaggaaaatgccaagagaagacttcacactaccttttttttttctggttttgccattcttttattcatgttgttacactcagtataggatagtttattaaaatcattatgtctgtagacattctatttgtgatatagaaattgtgttatttctgacctctattttttcctattatgtgacaaagaacataggtcctcagaccaacatgtggaaaccaagggccaaatggcttctaaggtccctcccaactgaataattctggtaaattccatttccatgtgctcactgacggatggtcctaataaccgctcttatttcttttatgcttgtgaaagtcatagtttttacaaaattacttgagggtgtattataaagattcaacagagcaaagtaaaggccaagtgacttgacatagtcatagctggaagaggagccttaccaagacaggtgtttctagttgccattatacttattctaccttatgaggacccattgtatgaggctagatggaagtgagtaaacagacgtcctacctttg

SEQ ID NO: 8580 - DNA, 1400 bp, Homo sapiens
cacaaatgaatagttatgaagttatcttccttttttctttgcagctccaaaataaggaggttttcagagagagagagaaagaaagatctaactatttgaataatatgaaggaatattttgaatatatatgaataatttgaataatatgaaatgatagacatgctaggtactgctctgtagtggttagcatagttgctgccccctttctgccatagtctagtgtgatatttcgttgggtaatgatgaatacctggtgccatggaagagaaaagtgggacatatactccagactttggaaatccaggtagcattgctgtcagctaaattaacacctgaagtttaaatagaaatgagccagatgagggcaagagtggaagagatggggataaagcaagggtggtccaagaggaagaagtaacccacacacaggcttgaaggcaaaaggtaacataaccttctcaagacagtaagtatagagtgatggtgcacactggaagagatggtagaattaggcaggatattgtaagccttgaaaaagaattaggcaggatatcggaagccctgattagattctatcctaagagcaacagaagatcactgacagtgttttaaatagatagactagtttattagatttgcagtttagaagttccctttttttgtaattattggacagtgtagagaccggatggtgagagatgagttaggaagttgtgacagctctctatacctaccgctaatgtagaggattatttattttcatttcattaccattcgtgtaaggtgtgtgtgtgtgtgtgtgtgtgtgtgtgtgtatagctagtttctctatagaaattatatggaagagtaagaaggcttcactttaaaattcatgtttttaatgagagtattttctgaatatgagacacttaccctcatttattttggccagggtgttggaactcgccataaggcattgatcaggattatggtttcccgttctgaaattgacatgaatgatatcaaagcattctatcagaagatgtatggtatctccctttgccaagccatcctggatgaaaccaaaggagattatgagaaaatcctggtggctctttgtggaggaaactaaacattcccttgatggtctcaagctatgatcagaagactttaattatatattttcatcctataagcttaaataggaaagtttcttcaacaggattacagtgtagctacctacatgctgaaaaatatagcctttaaatcatttttatattataactctgtataatagagataagtccattttttaaaaatgttttccccaaaccataaaaccctatacaagttgttctagtaacaatacatgagaaagatgtctatgtagctgaaaataaaatgacgtcacaagacaa

SEQ ID NO: 8581 - DNA, 581 bp, Homo sapiens
tttatttataaatattcaggtttcccctcccttgaatgtcaatgccattttgtatctccgcactcatcctgttatattaattttttttccttccccccccctttttttgtttgtttccagttgtctaacgggttttctcactatagtttatcaagtgagtcccacgtggggcccacgggtgcaggccttttccctcattgcctgcctgcctcccgcctgctccctcgggtcacctctgtccaccttccagactacgctcattattacaccattgggcccggcatgttcccgtcatctcagatccctagctggaaggactgggctaagcctgggccctatgaccagcctctggtgaacaccctgcagcgccgcaaagagaagcgagaaccggaccccaacgggggaggacccactaccgccagcggcccacctgcagcagctgaggaggctcagagaccacggagcatgactgtatcggctgccaccaggcctggtgaggagatggaggcttgtgaggagctggccctggccctgtctcggggcctgcagctggacacccagaggagcagccgggactcgct

SEQ ID NO: 8582 - DNA, 362 bp, Homo sapiens
tcagcagtgaagtcctcaagtgaggaatattattggtaaccagagctgcaagaaagcatgtccactaaatgaagcatagtgtgatactaatctagagcagggctcttcagagattgctgtgcacaggaaacatctgggatcgcgtgactgtgcaaactctgattcactaattccagcgccatggctacttattctgccacatgtgccaacaatagccctgcacagggcatcaacatggccaacagcattgccaacctgagactgaaggccaaggaatatagtttacagaggaaccaggtgccaacagtcaactgaggaaaaaaaataattaaacaggcctaagaagaaatcaaaaaccataa

SEQ ID NO: 8583 - DNA, 789 bp, Homo sapiens
atggttggctgtgactatgagatcgattccaatgccaccgaggatcgctgcggtgtgtgcctgggagatggctcttcctgccagactgtgagaaagatgtttaagcagaaggaaggatctggttatgttgacattgggctcattccaaaaggagcaagggacataagagtgatggaaattgagggagctggaaacttcctggccatcaggagtgaagatcctgaaaaatattacctgaatggagggtttattatccagtggaacgggaactataagctggcagggactgtctttcagtatgacaggaaaggagacctggaaaagctgatggccacaggtcccaccaatgagtctgtgtggatccagcttctattccaggtgactaaccctggcatcaagtatgagtacacaatccagaaagatggccttgacaatgatgttgagcagcagatgtacttctggcagtacggccactggacagagtgcagtgtgacctgcgggacagatcagagatccatgtgaaaaactggcaagacaatagtctaaactgagctcactggtatgagagccagccgactttccacagtttagtgctcagaggtaaagggcactctcagagaacaccagtgacagctttgtctccaagccagtgtctgttcttctctcccctcagcggcatttgcttttacttctgccttaccatggagagtgacgctctgactttaggggaatttaggactgactactcctcaggaaacttggaaaagaattaccatgcattacggaagg

SEQ ID NO: 8584 - DNA, 394 bp, Homo sapiens
ggtgaacagcctcttttgccggtattcagtgaagaaagcaagtctaaatatgcagttctctcactggagtgaaagatgttttgttcatttctaatcaactatgctagacagctgcaagctgaaaagtgcctgcaatttgccatttatttgtaataagttatacctggaaggaataacttgctattcgcacaactgagtgtatgagatcctactccatccacagctgtgcacctgtgaccatgagattgttcgaatgtttgaaaggataaaatacacaaaataataaacactgctggaaccagtaatgcagaagtccccttggctgatcccggaatgtaccagctggacattacattaagaaggggtcaaagtttagctgctcgagatcgaggag

SEQ ID NO: 8585 - DNA, 269 bp, Homo sapiens
caggaaggcaactcttgacaaaaccccagcaccaatttgttagaccagatgtcaactcttcttgtggtgaagggtacaagttaagtgggagtgtttatcaggagtgtcaaggcacaattccttggtttatggagattcgtctttgtaaagtgtgagaccttggaccacttgtacaactcctctgaaactctagcctttcttctgtaaagttggcataagactacagactaggaggtccagagaatgtaaataaaaagtaaaaaggacca

SEQ ID NO: 8586 - DNA, 486 bp, Homo sapiens
gagcacaggaggtgagtgagaagggcggccctgcagggtctccgaggcggttgagtcctgccactgggtggagggtatagccaccggacccgcctttcccggaacgcgccgtcctcggaaacgcctagaccccggcagctaggccgggaggcaccgcccactcctctagagcggagcgtggcccaggttgagccgccgcaccgtgggtctcgggtctcggtgacgagcagctgcccgcctccgattgcctgcgtttaggaggtggctgcgttgtgggaaaagctatcaaggaagaaattgccaaaccatgtctttttttctgttttcagagtagttcacaacagatctgagtgttttaattaagcatggaatacagaaaacaacaaaaaacttaagctttaatttcatctggaattccacagagacaaggccactttatgtttcccaggctggactggaacccctgggctcaaatgatcctcctac

SEQ ID NO: 8587 - DNA, 665 bp, Homo sapiens
ggcggcagattgtagtttttgttttggccggaaaggcttaccatgagttgccagggctgagagagatggagaaggattcgcggcggtgacagattaaattccccagttacattatagacttggagacttgtccttgtgtggacgggagccggaaagccttgagaacttattcctcgacccggacatggcacaggagaaaatgaaactaggtttcaagtcgctgccgagttccactaccgcagacggcaacattctgagaagagtcaacagtgcccctttgatcaatggacttggacggagtctcactgtgtcgcccaggctggagtgcagtggcatgatctcggctcactgcaacctctgcctcccgggttcaagcgattctcctgcctcagactcccgagtagctgggacttcaggcacccgccaccacgcccacctaattttttgtatttttagtagagacggggtttcaccgtgttagccaggatggtcttgatctcctgaccttgtgatccgcccaccttggcctcccaaagtgttgggattacaggcgtgagccactgcgcctggcctaaatcttacttcttaaactagacttttaaaatgagatgttggatttcacatttcagtattataaggttttctagataccgtaaaaatgtctg

SEQ ID NO: 8588 - DNA, 609 bp, Homo sapiens
acatttccgctgttctaaatacggctgcccttcagcagaagctgttgcctgcagacggcgcctgcgtatcgagcctccgtgaagaaaatcactccccagaatgagcccggctttgcggctgggtcctaaactgcgacatctgaatgggactccgagtgccttacatccctgcagccccttcctcttcctacacccccagcagcaaatgaggcacacctgcagacagcagctatctctctgtggacagtggtggccgccgtgcaggctatagagaggaaggtggagatccacagccggcgactcctacacctggaaggtcggacagggacagcagagaagaaactagccagctgtgaaaagacagttaccgagcttgggaaccagctggagggcaagtgggccgtgctgggaaccctgctgcaggagtacgggctgctgcagaggcggctggagaacttggagaacctgctgcgcaacaggaacttctggatcctgcggctccctccaggtattaagggagatatcccaaaggtgcctgtggcatttgatgatgtctccatctacttttccactccagagtgggaaaaattagaagaatggcaaaaggaa

SEQ ID NO: 8589 - DNA, 577 bp, Homo sapiens
ccttcttccaggcgcggccagcgggggcaagagcgaggtggctgcgaggaggcgtcactgaaagccctgacttggggaaggctgcgggctcggagccggagacgccgagctggggccgggtggcatttttctgaagttgttcattaagacttcccagcattcctacagatataaataggtgaggccgcaggcggtgctctgggtccgggagcgctgtccccagcatgaacgcggccggcggcgggagtgaatgactgcagctgcgacttccttcccgggccgcccgagcctccttccccaccgactttcttgttttgattaactccgtggactcctgactctttcttcgcccggaacatcaatatgtgtcatgtcattgtcacctgtcgctcgatgctctggaccttgctgagtattgtggtggcttttgccgagctcattgccttcatgagtgcagactggctgatcgggaaagcgaggagccgcggcggcgtggagccggcgggcccgggcgggggctccccggagccctaccaccccaccctgggcatctacgcccgctgcatccggaacccag

SEQ ID NO: 8590 - DNA, 1002 bp, Homo sapiens
gctgttacctcttctggcgtccgtgcccgcggaagttcgctcctagggaagtcgctcgcgtcctcaagagcacctgagaggatctcggcgaagcggaaggctttggtgccagctgggagagtctgcgccggatttcctcagctccttggcgcgtttcctcggagccgggggaggcaaagcacggaccccggagtcggcgcccatagcgggacgccctcgcgaggggcgggagtgcgggagagccgagctgctgcccttgactggtgctcaggggaccacagctgcaatgacagtttgggcctgcaaaaagaaggctggaacaacgggagatggaagctttctgcaaatgcagcaccactggtatccatgaatttaacctgcccatcattcttcctaaacaagagactattgaaaagtcagggtgttcaaaatggcttcagatcttatcaggacaatcttggctgttgcactaatttccaaacttgtaagtgcaatggatctgcagttctacttggcaagataaccattttaagttgaatgagaatgacatcacactcacacctgcaaaatctaaaatgtctaataaagtagattcctatgtctgaacttcaattttagggcacagctgtagatgcagaactgatgccatctggtgcgattctacagaataagagagaaaatttacccagagtgtgccatgcactggcttttctgggaatggcaaggtgccaggatttgtttttggttcgcttgcaggggtggaaacttggaactaggttccaagatggtccccgcagcaccccacaagaagaaggaggaagcccacagagaaaacggggcatgccagttcaaatccacttccttttaaagagcttcctcagcagcccaataacttttgccttcatctcattggccagaactgtgtcattggctactgctatctgcaagattgtctgagaaatgtagtttttgtagctggatatataactgcctttgacaaaa

SEQ ID NO: 8591 - DNA, 1535 bp, Homo sapiens
gacagagcagagtccacttctcatctccagtatccgtaaaaatttgtccaaaatgtaactaagaaaacacaatgatattagttacttctgctccccgtcaccctcaaccccactgattacgagatgggaactcacacaaaactttgagacaaaagagcaacaagtttgctttattgtttgcttgttttgttccggagtcggggccgggagggagtgcaggaggagggatccaagcttccaagcctctgctccgctctccttctatccagttggtctttagggcactgaaggaaactcttcttcagaaataaccttttaacttttcttctgtcagctgcctgccaatcacggagccagaggctgaggggaggctttgagccggtctgcgagtccggaaggcaaagatcgcgaagcttggcgctccagaacgctcagggggcaggtagcgctggtggattggaatcttgaagcaggtgtacagtgtaaagctgccctggatgagcagtttgaacctcagaagactctgttcatccagtgcgatgtggctgaccagcaacaactgagagacacttttagaaaagttgtagaccactttggaagactggacattttggtcaataatgctggagtgaataatgagaaaaactgggaaaaaactctgcaaattaatttggtttctgttatcagtggaacctatcttggtttggattacatgagtaagcaaaatggaggtgaaggcggcatcattatcaatatgtcatctttagcaggactcatgcccgttgcacagcagccggtttattgtgcttcaaagcatggcatagttggattcacacgctcagcagcgttggctgctaatcttatgaacagtggtgtgagactgaatgccatttgtccaggctttgttaacacagccatccttgaatcaattgaaaaagaagaaaacatgggacaatatatagaatataaggatcatatcaaggatatgattaaatactatggaattttggacccaccattgattgccaatggattgataacactcattgaagatgatgctttaaatggtgctattatgaagatcacaacttctaagggaattcattttcaagactatgatacaactccatttcaagcaaaaacccaatgaacagcttatgtgttagccatagctgaaaataagcacaaatagcttatattcagatcctatcttcatttgaatatagcttttaaatgaaatgttacagtttgaagttttccttcatgcacttggtgataaacgttttctaaatttttagttaagtatatggataaaaagttatgaactattaaaaatgtgatgtggaccaaaggctaggttgtaatcttgatagtctaaaaaatgatcaaaacaaatgattttcaaggaatattcaatattctgcctttcagaaagtgtatttatatctgtgcttcataaatattaatgttcttcagaacatcattttaaaggagatacttgaattgttatttaaatcaaaccagatgtaaaacac

SEQ ID NO: 8592 - DNA, 4664 bp, Homo sapiens
acacgtgaaggaagcctttgtgggccttcctgcgcagctgactagctgaaagccatcgtgagccagcccaggagaaaccagcagaggaacagccagccgaaccctgggattgtgagaaataatcaggtgaggccgcaggcggtgctctgggtccgggagcgctgtccccagcatgaacgcggccggcggcgggagtgaatgactgcagctgcgacttccttcccgggccgcccgagcctccttccccaccgactttcttgttttgattaactccgtggactcctgactctttcttcgcccggaacatcaatatgtgtcatgtcattgtcacctgtcgctcgatgctctggaccttgctgagtattgtggtggcttttgccgagctcattgccttcatgagtgcagactggctgatcgggaaagcgaggagccgcggcggcgtggagccggcgggcccgggcgggggctccccggagccctaccaccccaccctgggcatctacgcccgctgcatccggaacccaggggtgcagcacttccagcgggacacgctgtgcgggccctacgccgagagcttcggcgagatcgccagcggcttctggcaggccacagctattttcctggctgtgggaatctttattctctgcatggtggccttggtgtccgtcttcaccatgtgtgtacagagcatcatgaagaaaagcatcttcaatgtctgtgggctgttgcaaggaattgcaggtctattccttatcctcggtttgatactctaccctgctggctggggttgccagaaggccatagactactgtggacattatgcatctgcctacaaacctggagactgctccttgggctgggccttttataccgccattgggggcacagtcctcactttcatctgtgctgtcttctctgcacaagcagaaattgcaacctctagtgacaaagtacaggaagaaattgaagaggggaaaaatctgatctgcctcctttagtttggaagagacaatgccattttctcccttgagtaatcttgtgaaacagtccacagtttcatcatttgagtcaagtggagaactaacctttacctaccaaagccacgttccacggcccgaggcttaaacaggaccaatgagaggccacatccagctacgcaaagttactggacatgcggtctgcagtgcacattataaggaatggaacatgaaaatagtatataatcctagacctggagttgccaagttctgtcagactccatctcccccaggttcaatgaaggataataatctaaatcattagggcagcagtttctctggtaacggaagagaccgtccgccagatctgcaggctgtttctgctccaacactgcttgcttgtgagcatctctgcctcagaatggggttttgggttggagttcttgttttcctctgttctttcaagttgtctccaacgaacagaaaactataaacttactggggacaggatgtgtgctaaagggcacagcaagacactgtcttttgcttagctgaccaaaggggtcagcagggatggcgtggagtcatgctgtggaacttattctaggctgaatcctagggtaaggtggatcaactgaactgtcactccagagattttagaaatttgagtaaagaaacaataaggacctatacaatcatatgagaacaaaaatatgaaatcttgctagtgaagacgtattttttcttcttcccagcagccaggctagcaccagttctggcccagtctcctcttcttctggagatcacatgtttttcttctaaggttaggattgtgctttgactgcgaaaggaaacctcactgtttcctccttccagggactgaggtctccaagctagctgtggcttatgcagatgttcactgggaggacctgccagaatctcggcacttggggggagacctttactcccagtttggtgaccatgctgtagtcagctctatttccaatcccgacagtagcagaatggcattctacaacaaaaagaagctagttatgggagttaagtttttgtagttactggtgttgatcctgaaagcagactgagataacattaaattgctgcaactgaagaactgcagccaagaccttaattccaggaaagcacagaggacaaagttaattcaaaaagaggcgctagatcaaggtcacagcactgcctacacctgtttacaaaaagaatcaaataccactatgaataaggattcaggggtttttaatctactttccataaattaccaatatcactgattcaggaagatagtatctcagaatgaccagagcagcacagaaacaagctactctgacattatgggagcttcaaaattgtatcatgatacagaaacactccttagcactttaagaaagtgagatggaactgccagatttctggaaggagaaaaagtgtaggtatttgggttcattaatctgctcacttgaggactttgttttgaaaaagtaccttctgtggacaaggtattgtgctaccagctatacaaccctgacttcagagtttgcaaccttgccctgagtgaatcatgttaaagctgtctgagtctaaagcaccgtatcttggtgcagaacagataattatacagagatggaatgggacaaccgcagttttactacattctggtgtttggcctatatgagaaaccatcttctcacagattaagggctaagggcaaaaggggtgggaggtgtggaactagccttaatgagtttcccattcctgaaccaaaattcaaagtgagtgagatgtaaatcctgtgattttggtgaagaaaaaaacgggtatcttcatagcagcctaggaaaccttaaccatatctctaacaccacacagaaagaggctggaggagccactggacaaagcttctgtctctgtgtgtacatttataatgttctaaccaagtctcaaaccttgatgaaaaacacaaaatttttccataaacttatcagaagactcacttttctttctttcttggatagagaaaccattttctgacactaggtttacaatctcagtgtccttacaagttaagtcctaagctcacaggatcctccgagcatgtccatcacctgctctttggctaaggtggcagtgtacctctagatcaacctgggaacagtcacaagggagtgtgacttcttggccataataaactcactcgatagtgtttatgttattaatctgaatgcaacagaagacaaaagcacaggcatgcacacacacagaaccccaaaccactaaaaactacctaaacactgacttagtaaatagtaaaaaggtaatgttgggacttttaaaccttgaatccattagccaggcttgggatgaaaggaccatctaaaatcatgctagtctaaaccatgctcttccacacagctgtttaaaaaccactgggtatgaggaatatgctagaaagaaatgttaaaaatagattgttggctcacacttatttttctaataaataggaccattattactaccaggaaagtcttatttattttgcctgaaattggcttaaagaaagtctcatgacgggatgggatgggctgcgcttctcaatgaactctgaggcagaaatatttgccttggattctgtggattctttaaacctgtgtgctaataattcaaacaatgttgcattaattgtataagggtttttgtatagttttcaaacatctgtggtgtaatgatctttgttaaacatatattctgtaaagtgccatagtctttttttatgtgtagcatatttaaaaatatatatgtatattatacatacacaagtttgtgtgaaagatgtgcaataacaaaggtgtatgtatgttttgttgttttgttttggaaactggacaggagtcaaaacagggatgtttgtttctgttttggcaaggagagttccacatttttgccttcatggcttattcagtaacccataattttaatgctacacaaatcttatgtgaagaaaagactggtatgaaatcattttttcctgggtctaaaataatcgctagtgttatgtcaaagttaagcccgcacgccaggcccagttaatgctagtctttcatgtgaaatgtgaagctgccatgttgccttttctcttagtaggataactagtagctggtacataatcactgaggagctatttcttaacatgcttttatagaccatgctaatgctagaccagtatttaagggctaatctcacacctccttagctgtaagagtctggcttagaacagacctctctgtgcaataacttgtggccactggaaatccctgggccggcatttgtattggggttgcaatgactcccaagggccaaaagagttaaaggcacgactgggatttcttctgagactgtggtgaaactccttccaaggctgagggggtcagtaggtgctctggagggactcggcaccacttgatattcaacagccacttgagccaaatataaaattgtatttacagctgatggactcaatttgagccttcaaacttgtagttatcctattatattgtaaactaatacattgtctagcattgatttggttcctgtgcatatgtattttcactatgtgctcccctccccagatcttaattaaaccagattttgcaattc

SEQ ID NO: 8593 - DNA, 347 bp, Homo sapiens
accccttgatgagcctttgatgaggagatgattaggagtaaaaaaatgctgcatagattatctgcataactaacactgtagcagacagccatgcagacatttttctgtatacaactcccactcatttttctgagagataaaagcagccaagattgacaatctgtcagtttcaccattttcattgtgtactttttctgggcaggttattcacatcgaactcctttgatgtgatcagtgatgatgcttttattggtcttccacatctagagtatttattcatagaaaacaacaacatcaagtcaatttcaagacatactttccggggactaaagtcattaattcacttg

SEQ ID NO: 8594 - DNA, 708 bp, Homo sapiens
acacaatgtgccatcctgacaaggcttttacttctgataagctccaatgtgtgtttaatgaatacaaagccgcggtctgggtgccgcctcggccgcggccgctctcccgcgctcctttgccagaagctggcggagagaatttacatttaaagattagcagagtgagaaagagaaatctgccttttgttgtgtggggtgaggaggaggcatctacccctggccttgacgctatctcccatcacctctgctatccagacaggactcaccgagaaaagattgatctctgggctggtgaacataatctctgtcccagtcagaaaaggagagaggaaattagcagagcgattggtggagaatgatatctgtcaaaagaaacacttggagagcactgagtttagtaataggtgactgccggaaaaaagggaactttgaatattgtcaaggcgcacgcgcccagcaccctgcctccggcgatgccgccccagcccctctgatggccctcctctctgctgccactcattccagaacaggaggcatgagcccggaacgcgcttgcttttaggagacagccactttctgtgtggtacgctggattcaaggatgcctgatcgtactgagaagcactccacaatgccagactcacctgtggatgtgaagacgcaatctaggctgactcctccaacaatgccacctcccccaactactcaa

SEQ ID NO: 8595 - DNA, 2208 bp, Homo sapiens
gactgtgaggggcgcttctgactttggacttgagcactgcctgggacctgtgctgagagagcgctagcatgtctcagtggaatcaagtccaacagttagaaatcaagtttttggagcaggtggatcaattctatgatgacaactttcccatggaaattcggcatctgttggcccaatggattgaaaatcaagactgggaggcagcttctaacaatgaaaccatggcaacgattcttcttcaaaacttgttaatacaactggatgaacagttaggtcgtgtttccaaagagaaaaacctactcttgatacacaatctaaaaagaattaggaaggtccttcagggaaaatttcatggaaatccaatgcatgtagctgtggttatttcaaactgtttaagggaagagaggagaatattggctgcagccaacatgcctgtccaggggcctctagagaaatccttacaaagttcttcagtttcagaaagacagaggaatgtggagcacaaagtggctgccattaaaaacagtgtgcagatgacagaacaagataccaaatacttagaagatctgcaagacgaatttgactacaggtataaaacaattcagacaatggatcagagtgacaagaatagtgccatggtgaatcaggaagttttgacactgcaggaaatgcttaacagcctcgatttcaagagaaaggaggctctcagtaaaatgacccaaatcatccatgagacagacctgttaatgaacaccatgctcatagaagagctgcaagactggaagcggcggcagcaaatcgcctgcatcgggggtccactccacaatgggctcgaccagcttcagaactgctttacactattggcagaaagtcttttccaactgagaaggcaattggagaaactagaggagcaatctaccaaaatgacatatgaaggtgatcccattccaatgcaaagaactcacatgctagaaagagtcaccttcttgatctacaaccttttcaagaactcatttgtggttgagcgacagccatgtatgccaacccaccctcagaggccgttggtacttaaaaccctaattcagttcactgtaaaactaaggctactaataaaattgccagaactaaactatcaggtaaaggttaaggcatcaattgacaagaatgtttcaactctaagcaaccgaagatttgtactttgtggaactaatgtcaaagccatgtctattgaagaatcttccaatgggagtctctcagtagaatttcgacatttgcaaccaaaggaaatgaagtccagtgctggaggtaaaggaaatgagggctgtcacatggtgactgaagaacttcattccataacgtttgaaacacagatctgcctctatggcctgaccatagatttggagaccagctcattgcctgtggtgatgatttccaatgtcagtcagttacctaatgcttgggcatccatcatttggtacaacgtgtcaaccaacgattcccagaacttggttttctttaataatcctccacctgccacattgagtcaactactggaggtgatgagctggcagttttcatcgtacgttggtcgtggtcttaactcagatcaactccatatgctggcagagaagcttacagtccaatctagctacagtgatggtcacctcacctgggccaagttctgcaaggaacatttacctggtaaatcatttaccttttggacatggcttgaagcaatattggatctaattaagaaacacattcttcccctttggattgatgggtatgtcatgggctttgttagcaaagagaaggaacggctgttgctaaaggataaaatgcctggcacctttttattaagattcagtgaaagccatctcggaggaataactttcacctgggtggaccattctgaaagtggggaagtgagattccactctgtagaaccctacaataaaggccggttgtctgctctgccattcgctgacatcctgcgagactacaaagttattatggctgaaaacattcctgaaaaccctctgaagtacctatatcctgacattcccaaagacaaagccttcggtaaacactacagctctcagccttgcgaaggttaggtttttctgtttgtttttgtttttttttccttaagattttggaaaataacctcatattggagcaaagtaaatgaagttccccttcttgttt

SEQ ID NO: 8596 - DNA, 725 bp, Homo sapiens
tcaatccgccgagtcatatggggacctttcggaggaggcatttttggacagaaactggaggatactgttcgttatgagaagagatatgggaaccgtctggctccgatgttggtggagcagtgcgtggactttatccgacaaagggggctgaaagaagagggtctctttcgactgccaggccaggctaatcttgttaaggagctccaagatgcctttgactgtggggagaagccatcatttgacagcaacacagatgtacacacggtggcatcacttcttaagctgtacctccgagaacttccagaaccagttattccttatgcgaagtatgaagattttttgtcatgtgccaaactgctcagcaaggaagaggaagcaggtgttaaggaattagcaaagcaggtgaagagtttgccagtggtaaattacaacctcctcaagtatatttgcaggtttcatcaaagacatttgtaactgaattctgttagaaaaataattgtgccagaaaaataattgtgcctggaaaatatacctctcaatgtataactcaagacctgggatgggatatgccatatatgtgctcctgtttaagaaaccaaatatgcaaaattgaaacagaataaatttaaatagagagtgatgattggcactacaagtcactgcagggtgtcttacatgatagcttcccagtccattttaaaataaaattcaaagttttaattgag

SEQ ID NO: 8597 - DNA, 263 bp, Homo sapiens
ggagtcagttcaacgtcgaggtcggcagaagtgacaagctttccctgcctggctttgagaacctcacagcaggatataacaaatttctcaggcccaattttggtggagaacccgtacagatagcgctgactctggacattgcaagtatctctagcatttcagagagtaacatggtaagcgctgttcctttgtactctacccaagtagtccctctctgtgtgtttaaaggggatatgctttctagccgctcaaaaaaaaaaaaa

SEQ ID NO: 8598 - DNA, 1306 bp, Homo sapiens
cggcctggggatacaactctggagtcctctgagagagccaccaaggaggagcaggggagcgacggccggggcagaagttgagaccacccagcagaggagctaggccagtccatctgcatttgtcacccaagaactcttaccatgaagaccctcctactgttggcagtgatcatgatctttggtaagagctgaccctgacctctgagcatggggggacagccccagaagggaagcactcttgtcccttagttttctctcccattgcagtgatcctctctcagggggaaaaaagaagccatttgggaggaaggagagtagcagagaggggcagagagggagggcgcagaaccccatgccccatcaccagacaactcccaaatttccttccaggcctactgcaggcccatgggaatttggtgaatttccacagaatgatcaagttgacgacaggaaaggaagccgcactcagttatggcttctacggctgccactgtggcgtgggtggcagaggatcccccaaggatgcaacggatcggtgaggccacctatccctccctaccctcctagactctggcccaggcagggctgggagctgcaaagacagtgccggttcctgatgggcgcagaggtctcaggatggcctggctggaaaagcagccggcatgttggaacttctgctctagactgttgcaaagtcactgggtctctgcccagggtccaagggggtgagaccacaggcaccaggcctcctggagctgtgggacaagagccccaacagggtgtctcctcacagctgctgtgtcactcatgactgttgctacaaacgtctggagaaacgtggatgtggcaccaaatttctgagctacaagtttagcaactcggggagcagaatcacctgtgcaaaacaggactcctgcagaagtcaactgtgtgagtgtgataaggctgctgccacctgttttgctagaaacaagacgacctacaataaaaagtaccagtactattccaataaacactgcagagggagcacccctcgttgctgagtcccctcttccctggaaaccttccacccagtgctgaatttccctctctcataccctccctccctaccctaaccaagttccttggccatgcagaaagcatccctcacccatcctagaggccaggcaggagcccttctatacccacccagaatgagacatccagcagatttccagccttctactgctctcctccacctcaactccgtgcttaaccaaagaagctgtactccggggggtctcttctgaataaagcaattagcaaa

SEQ ID NO: 8599 - DNA, 2214 bp, Homo sapiens
attccaagtcgctgctgtgcagagcagcaagtgctccgtgcagggctgttgctatcacttggaggtgaacagcctcttttgccggtattcagtgaagaaagcaagtctaaatatgcagttctctcactggagtgaaagatgttttgttcatttctaatcaactatgctagacagctgcaagctgaaaagtgcctgcaatttgccatttatttgtaataagaaaataataaacactgctggaaccagtaatgcagaagtccccttggctgatcccggaatgtaccagctggacattacattaagaaggggtcaaagtttagctgctcgagatcgaggagggacgagtgatccatatgtgaagtttaaaatcggaggaaaagaagtttttagaagtaagataatacacaagaacctcaaccctgtgtgggaagaaaaagcttgtattctggttgatcatcttagggagccattgtatataaaggtatttgactatgattttggactacaggatgactttatgggctcagcctttctggatctgacacaattggagttaaacaggcccacagatgtgacccttactctgaaagatcctcattatcctgaccatgatcttggaatcattttgctctcagtcatccttacccctaaagaaggagagtccagggatgtgtttcagacccaaagtttacgcctatcagacctacacagaaaatcgcatctttggagaggaatagtcagcatcaccttgattgaagggagagacctcaaggccatggattccaacgggttgagcgatccctacgtgaagttccggcttgggcatcagaagtacaagagcaagattatgccaaaaacgttgaatcctcagtggagggaacaatttgattttcacctttatgaagaaagaggaggagtcattgatatcactgcatgggacaaagatgctgggaaaagggatgatttcattggcaggtgccaggtcgacctgtcagccctcagtagggaacagacgcacaagctggagttgcagctggaagagggtgagggacacctggtgctgctggtcactctgacagcatcagccacagtcagcatctctgacctgtctgtcaactccctggaggaccagaaggaacgagaggagatattaaagagatatagcccattgaggatatttcacaacctgaaagatgtgggatttctccaggtgaaagtcatcagagcggaagggttaatggctgccgacgtcactggaaaaagtgacccattttgtgtggtagaactgaacaacgatagactgctaacacatactgtctacaaaaatctcaatcctgagtggaataaagtcttcacgttcaacattaaagatatccattcagttcttgaagtgacagtttatgatgaagatcgggatcgaagtgctgactttctgggcaaagttgctataccattgctgtctattcaaaatggtgaacagaaagcctacgtcttgaaaaacaagcagctgacagggccaacaaagggggtcatctatcttgaaatagatgtgatttttaatgctgtgaaagccagcttacgaacattaatacccaaagaacagaagtacattgaagaggaaaacagactctctaaacagctgctactaagaaactttatcagaatgaaacgttgtgtcatggtgctggtaaatgctgcatactacgttaatagttgctttgattgggattcacccccaaggagtctcgctgcttttgtgctctttctctttgttgtctggaactttgagctctacatgataccactggttttgttgttactattgacatggaactacttcttgataatatcagggaaagataacaggcaacgtgatacagtagtggaggacatgctagaggacgaggaagaagaagatgacaaagatgacaaggacagtgaaaaaaagggatttataaataaaatctatgccatccaggaggtatgtgtcagtgtccagaacatcctagatgaagtggcttcctttggcgaaaggataaagaatactttcaactggactgtcccattcttaagctggctggccattgtagccctctgtgtgttcacagccatcctgtactgcattccgctgagatacattgtccttgtctggggcatcaataaatttacaaaaaagcttcggagtccatatgcaattgataacaatgaactact

SEQ ID NO: 8600 - DNA, 5600 bp, Homo sapiens
tcccggcaccccgagcccttcctccggagctgctgcttctactttggctgctatcgccgccgccgcgggtggcccgctgctgactgggctcgccgggagacggagaagcactttttggccctccctcagcagctctcacaccccaactttgccgccgccgccgcgcctgccctcgcagcggcgctcggccgcacattgtgggggcgcacgccgggaggctccgcaagaccgtggaggcaggaaacggcactactgcgcttctgcctcggctctttgttgttcgctttggatggttcttgaaagtgtctgagcctcctcggaaatcctggggccggagaagacaaaccttggaattcttcctctgcaaaagtctctgagatactgacaagcgtccggaaaggtcgacgagtaattgccctgaaaactcttggctaattgacccacgttgcttatattaagcctttgtgtgtggtgtgtggcttcatacatttggggaccctatttccactccctcctcttggcatgagactgtatacaggatccacccgaggacaatgattgcggagcccgctcacttttacctgtttggattaatatgtctctgttcaggctcccgtcttcgtcaggaagattttccacctcgcattgttgaacacccttcagacctgattgtctcaaaaggagaacctgcaactttgaactgcaaagctgaaggccgccccacacccactattgaatggtacaaagggggagagagagtggagacagacaaagatgaccctcgctcacaccgaatgttgctgccgagtggatctttatttttcttacgtatagtacatggacggaaaagtagacctgatgaaggagtctatgtctgtgtagcaaggaattaccttggagaggctgtgagccacaatgcatcgctggaagtagccatacttcgggatgacttcagacaaaacccttcggatgtcatggttgcagtaggagagcctgcagtaatggaatgccaacctccacgaggccatcctgagcccaccatttcatggaagaaagatggctctccactggatgataaagatgaaagaataactatacgaggaggaaagctcatgatcacttacacccgtaaaagtgacgctggcaaatatgtttgtgttggtaccaatatggttggggaacgtgagagtgaagtagccgagctgactgtcttagagagaccatcatttgtgaagagacccagtaacttggcagtaactgtggatgacagtgcagaatttaaatgtgaggcccgaggtgaccctgtacctacagtacgatggaggaaagatgatggagagctgcccaaatccagatatgaaatccgagatgatcataccttgaaaattaggaaggtgacagctggtgacatgggttcatacacttgtgttgcagaaaatatggtgggcaaagctgaagcatctgctactctgactgttcaagttgggtctgaacctccacattttgttgtgaaaccccgtgaccaggttgttgctttgggacggactgtaacttttcagtgtgaagcaaccggaaatcctcaaccagctattttctggaggagagaagggagtcagaatctacttttctcatatcaaccaccacagtcatccagccgattttcagtctcccagactggcgacctcacaattactaatgtccagcgatctgatgttggttattacatctgccagactttaaatgttgctggaagcatcatcacaaaggcatatttggaagttacagatgtgattgcagatcggcctcccccagttattcgacaaggtcctgtgaatcagactgtagccgtggatggcactttcgtcctcagctgtgtggccacaggcagtccagtgcccaccattctgtggagaaaggatggagtcctcgtttcaacccaagactctcgaatcaaacagttggagaatggagtactgcagatccgatatgctaagctgggtgatactggtcggtacacctgcattgcatcaacccccagtggtgaagcaacatggagtgcttacattgaagttcaagaatttggagttccagttcagcctccaagacctactgacccaaatttaatccctagtgccccatcaaaacctgaagtgacagatgtcagcagaaatacagtcacattatcgtggcaaccaaatttgaattcaggagcaactccaacatcttatattatagaagccttcagccatgcatctggtagcagctggcagaccgtagcagagaatgtgaaaacagaaacatctgccattaaaggactcaaacctaatgcaatttaccttttccttgtgagggcagctaatgcatatggaattagtgatccaagccaaatatcagatccagtgaaaacacaagatgtcctaccaacaagtcagggggtggaccacaagcaggtccagagagagctgggaaatgctgttctgcacctccacaaccccaccgtcctttcttcctcttccatcgaagtgcactggacagtagatcaacagtctcagtatatacaaggatataaaattctctatcggccatctggagccaaccacggagaatcagactggttagtttttgaagtgaggacgccagccaaaaacagtgtggtaatccctgatctcagaaagggagtcaactatgaaattaaggctcgccctttttttaatgaatttcaaggagcagatagtgaaatcaagtttgccaaaaccctggaagaagcacccagtgccccaccccaaggtgtaactgtatccaagaatgatggaaacggaactgcaattctagttagttggcagccacctccagaagacactcaaaatggaatggtccaagagtataaggtttggtgtctgggcaatgaaactcgataccacatcaacaaaacagtggatggttccaccttttccgtggtcattccctttcttgttcctggaatccgatacagtgtggaagtggcagccagcactggggctgggtctggggtaaagagtgagcctcagttcatccagctggatgcccatggaaaccctgtgtcacctgaggaccaagtcagcctcgctcagcagatttcagatgtggtgaagcagccggccttcatagcaggtattggagcagcctgttggatcatcctcatggtcttcagcatctggctttatcgacaccgcaagaagagaaacggacttactagtacctacgcgggtatcagaaaagtaacttaccagagaggaggcgaagctgtcagcagtggagggaggcctggacttctcaacatcagtgaacctgccgcgcagccatggctggcagacacgtggcctaatactggcaacaaccacaatgactgctccatcagctgctgcacggcaggcaatggaaacagcgacagcaacctcactacctacagtcgcccagctgattgtatagcaaattataacaaccaactggataacaaacaaacaaatctgatgctccctgagtcaactgtttatggtgatgtggaccttagtaacaaaatcaatgagatgaaaaccttcaatagcccaaatctgaaggatgggcgttttgtcaatccatcagggcagcctactccttacgccaccactcagctcatccagtcaaacctcagcaacaacatgaacaatggcagcggggactctggcgagaagcactggaaaccactgggacagcagaaacaagaagtggcaccagttcagtacaacatcgtggagcaaaacaagctgaacaaagattatcgagcaaatgacacagttcctccaactatcccatacaaccaatcatacgaccagaacacaggaggatcctacaacagctcagaccggggcagtagtacatctgggagtcaggggcacaagaaaggggcaagaacacccaaggtaccaaaacagggtggcatgaactgggcagacctgcttcctcctcccccagcacatcctcctccacacagcaatagcgaagagtacaacatttctgtagatgaaagctatgaccaagaaatgccatgtcccgtgccaccagcaaggatgtatttgcaacaagatgaattagaagaggaggaagatgaacgaggccccactccccctgttcggggagcagcttcttctccagctgccgtgtcctatagccatcagtccactgccactctgactccctccccacaggaagaactccagcccatgttacaggattgtccagaggagactggccacatgcagcaccagcccgacaggagacggcagcctgtgagtcctcctccaccaccacggccgatctcccctccacatacctatggctacatttcaggacccctggtctcagatatggatacggatgcgccagaagaggaagaagacgaagccgacatggaggtagccaagatgcaaaccagaaggcttttgttacgtgggcttgagcagacacctgcctccagtgttggggacctggagagctctgtcacggggtccatgatcaacggctggggctcagcctcagaggaggacaacatttccagcggacgctccagtgttagttcttcggacggctcctttttcactgatgctgactttgcccaggcagtcgcagcagcggcagagtatgctggtctgaaagtagcacgacggcaaatgcaggatgctgctggccgtcgacattttcatgcgtctcagtgccctaggcccacaagtcccgtgtctacagacagcaacatgagtgccgccgtaatgcagaaaaccagaccagccaagaaactgaaacaccagccaggacatctgcgcagagaaacctacacagatgatcttccaccacctcctgtgccgccacctgctataaagtcacctactgcccaatccaagacacagctggaagtacgacctgtagtggtgccaaaactcccttctatggatgcaagaacagacagatcatcagacagaaaaggaagcagttacaaggggagagaagtgttggatggaagacaggttgttgacatgcgaacaaatccaggtgatcccagagaagcacaggaacagcaaaatgacgggaaaggacgtggaaacaaggcagcaaaacgagaccttccaccagcaaagactcatctcatccaagaggatattctaccttattgtagacctacttttccaacatcaaataatcccagagatcccagttcctcaagctcaatgtcatcaagaggatcaggaagcagacaaagagaacaagcaaatgtaggtcgaagaaatattgcagaaatgcaggtacttggaggatatgaaagaggagaagataataatgaagaattagaggaaactgaaagctgaagacaaccaagaggcttatgagatctaatgtgaaaatcatcactcaagatgcctcctgtcagatgacacatgacgccagataaaatgttcagtgcaatcagagtgtacaaattgtcgtttttattcctcttattgggatatcattttaaaaactttattgggtttttattgttgttgtttgatccctaaccctacaaagagccttcctattcccctcgctgttgg

SEQ ID NO: 8601 - DNA, 793 bp, Homo sapiens
cttcactctctaatcatacacatcatcattactaaccctgtatcatttccccatctgtgcttgtgtgtgtgtgtgtgtgtgtgcatgtgtctcctggtcagtcttttctgttacactttgtaagctatgaaggcaggcacttggtcaatatagtgctttttgtgcagcatcaaacttagctccatgtatgattaggtccctaaaacattacttttggtgatgatgatgatgatccatgagtagctggggatgctagaagcattgatagtcatcgggaaaggctggaggtaagttctggaatatagtcaagactcagtgctgcccagtgctgtgggtagaaaaaaaggaaaggtacccttagatatctgtgagagatataaaggaaaggagtgtgtgtgatgtgaggccaaagggatgagaggtatgggaagagaaaacaggcttgctcctgcagcatggggcctgttgctgactactgactactacattctcagcacttgtggggaccaaatggaagcttctcctctcaaacatttgtgtttacttttctatttaatgtgtgaatattttctttcctgcaccacgtgcggtcagtccgtgacaagtgtgccctaggctctcatggttgccagcacatttgtgtgagtgatggggccgcatcctaccactgtgattgctatcctggctacaccttaaatgaggacaagaaaacatgttcagccactgaggaagcacgaagacttgtttccactgaagatgcttgtggatgtgaagctacactggcattccagga

SEQ ID NO: 8602 - DNA, 809 bp, Homo sapiens
ctgggacatgccattctaggctccaggtacccacacacgcatgctgtctacaacttccaggaagatagtaacattcccatttacagatgaggaaaatgaggctcaaagaggttcagtcacttgaccatggatctcacagagttgaaaaaagtgccaaacaacatccctccagatattgttaaacttgacttgtcatacaataaaatcaaccaacttcgacccaaggaatttgaagatgttcatgagctgaagaaattaaacctcagcagcaatggcattgaattcatcgatcctgggtctttgagatgaaaccctgcaagtagacttacgtgaatgatttttgctgtgccgcttttttagggctcacacatttagaagaattagatttatcaaacaacagtctgcaaaactttgactatggcgtattagaagacttgtattttttgaaactcttgtggctcagagataacccttggagatgtgactacaacattcactacctctactactggttaaagcaccactacaatgtccattttaatggcctggaatgcaaaacgcctgaagaatacaaaggatggtctgtgggaaaatatattagaagttactatgaagaatgccccaaagacaagttaccagcatatcctgagtcatttgaccaagacacagaagatgatgaatgggaaaaaaaacatagagatcacaccgcaaagaagcaaagcgtaataattactatagtaggataaggtagaaattgttctgattgtaattagttttgtattttctatactggtgttagaaaacatatg

SEQ ID NO: 8603 - DNA, 3157 bp, Homo sapiens
gctggaggttcgctagccgaagcggctgcatctggcgccgcgtctgccccgcgtgctcggagcggattctgcccgccgtccccggagccctcggcgccccgctgagcccgcgatcacttcctccctgtgaccaaccggcgctgcaggttagagcctggcaatgccgtttgggtgtgtgactctgggcgacaagaagaactataaccagccatcggaggtgactgacagatatgatttgggacaggtcatcaagactgaggagttttgtgaaatcttccgggccaaggacaagacgacaggcaagctgcacacctgcaagaagttccagaagcgggacggccgcaaggtgcggaaagctgccaagaacgagataggcatcctcaagatggtgaagcatcccaacatcctacagctggtggatgtgtttgtgacccgcaaggagtactttatcttcctggagctggccacggggagggaggtgtttgactggatcctggaccagggctactactcggagcgagacacaagcaacgtggtacggcaagtcctggaggccgtggcctatttgcactcactcaagatcgtgcacaggaatctcaagctggagaacctggtttactacaaccggctgaagaactcgaagattgtcatcagtgacttccatctggctaagctagaaaatggcctcatcaaggagccctgtgggacccccgagtatctgggcaagcagggggtggggcaggggcagggggataatggggggcagccttcagggagctgctctgggcagggggaaaatgtgctcatctcaggaagctggtgtggatggtactggacctggctaggcctgatactgaccagcagatgggcgctgtgtttgtagccccagaggtggtaggccggcagcggtatggacgccctgtggactgctgggccattggagtcatcatgtacatcctgctttcaggcaatccacctttctatgaggaggtggaagaagatgattatgagaaccatgataagaatctcttccgcaagatcctggctggtgactatgagtttgactctccatattgggatgatatttcgcaggcagccaaagacctggtcacaaggctgatggaggtggagcaagaccagcggatcactgcagaagaggccatctcccatgagtggatttctggcaatgctgcttctgataagaacatcaaggatggtgtctgtgcccagattgaaaagaactttgccagggccaagtggaagaaggctgtccgagtgaccaccctcatgaaacggctccgggcaccagagcagtccagcacggctgcagcccagtcggcctcagccacagacactgccacccccggggctgcaggtggggccacagctgcagctgcgagtggagctacctcagcccctgagggtgatgctgctcgtgctgcaaagagtgataatgtggcccccgcagaccgtagtgccaccccagccacagatggaagtgccaccccagccactgatggcagtgtcaccccagccaccgatggaagcatcactccagccactgatgggagtgtcaccccagccactgacaggagcgctactccagccactgatgggagagccacaccagccacagaagagagcactgtgcccaccacccaaagcagtgccatgctggccaccaaggcagctgccacccctgagccggctatggcccagccggacagcacagccccagagggcgccacaggccaggctccaccctctagtaaaggggaagaggctgctggttatgcccaggagtctcaaagggaggaggccagctgagtaggcagcctggtgagggggggcaggggatgggcaggagggtgggagagtggatgaggggcttctcactgtacatagagtcactggcatgatgccctcgctcccccatgcccccacatcccagtggggcataactaggggtcacgggagagcagtctcgtctcctgtgtgtatgtgtgtgagtggtgggcaggccagtggcagggccggccccagcccctgcatggattccttgtggcttttctgtcttttgctagcttcaccagtttctgttccttgtgggatgctgctctagggatactcagggggctcctgctctccttccccttcccttcttgcctcaccattcccctaggcaggccctgcaggtcccacactctcccaggccctaaacttgggcggccttgccctgagagctggtcctccagcgaggccctgtcagcggtcttaggctcctgcacatgaaggtgtgtgcctgtggtgtgtgggctgctctaggagcagatacaggctggtatagaggatgcagaaaggtagggcagtatgtttaagtccagacttggcacatggctagggatactgctcactagctgtggaggtcctcaggagtggagagaatgagtaggagggcagaagcttccatttttgtccttcctaagaccctgttatttgtgttatttcctgcctttccgagtcctgcagtgggctgccctgtaccctgaacctcatgagcctctaagggaaaggaggaacaattaggacgtggcaatgagacctggcagggcagagtacaagcccagcacccagtgtcccagccttactgggtccttaccctgggccaaacagggagggctgatacctccttgctcttcctagatgcccacctcctacaatctcagcccacaagtcctctccaccctagggggcttgctgcatggcaataactcataatctgatttggaggtttgccctttacaggggcagattttctgctcagttcaacaatgaaatgaagaggaactccctctttctacagctcacttctatcagaggcccaggtgcctcagagccacattgagttgctttttctgggatgaggaagtagggttaaactccccagtttcctgagggaggctcctgacaggtgccctttgtcagaccctaccacagcctggataggcagccacattggtcctcgcccttgctcggcactccgtggtggtcctgcccttctccctgcatgcctgtgggtctgctctggtgtgtgaaggtcggtgggttaactgtgtgcctactgaacctggcaaataaacatcaccctgcaaagcct

SEQ ID NO: 8604 - DNA, 700 bp, Homo sapiens
agtcaaggagtgagggacagggaatgaacatgccatggcacagggcaggacctgctgaaagacagacaggcccagcagcgtagagaagcggtgattcctacttcagccccttggtgtgagcagcttctcaacatgaactacagcctccacttggccttcgtgtgtctgagtctcttcactgagaggatgtgcatccaggggagtcagttcaacgtcgaggtcggcagaagtgacaagctttccctgcctggctttgagaacctcacagcaggatataacaaatttctcaggcccaattttggtggagaacccgtacagatagcgctgactctggacattgcaagtatctctagcatttcagagagtaacatggactacacagccaccatatacctccgacagcgctggatggaccagcggctggtgtttgaaggcaacaagagcttcactctggatgcccgcctcgtggagttcctctgggtgccagatacttacattgtggagtccaagaagtccttcctccatgaagtcactgtgggaaacaggctcatccgcctcttctccaatggcacggtcctgtatgccctcagaatcacgacaactgttgcatgtaacatggatctgtctaaataccccatggacacacagacatgcaagttgcagctggaaagctggggctatgatggaaatgatgtggagt

SEQ ID NO: 8605 - DNA, 567 bp, Homo sapiens
gagggctccgacagcagttcccagccagcgtgttcagcctgcctgcctgcctgcctctgaggcatacaccatacatggtacagccagagtaccgaatctatgagatgaacaagagactgcagtctcgcacagaggatagtgacaacctctggtgggacgcctttgccactgaattttttgaagatgacgccacattaaccctttcattttgtttggaagatggaccaaagcgatacactatcggcaggaccctcatcccccgttactttagcactgtgtttgaaggaggggtgaccgacctgtattacattctcaaacactcgaaagagtcataccacaactcatccatcacggtggactgcgaccagtgtaccatggtcacccagcacgggaagcccatgtttaccaaggtatgtacagaaggcagactgatcttggagttcacctttgatgatctcatgagaatcaaaacatggcactttaccattagacaataccgagagttagtcccgagaagcatcctagccatgcatgcacaagatcctcaggtcctggatcagctgtcca

SEQ ID NO: 8606 - DNA, 602 bp, Homo sapiens
gacggtctcccgacacgccggctgagagcccttttcgactgtgagctgcggcagctgagcagaggcggcggcgcgggacctgcagtcgccagggattccctccaggtgacgatgctctggttctccggcgtcggggctctggctgagcgttactgccgccgctcgcctgggattacgtgctgcgtcttgctgctactcaattgctcgggggtccccatgtctctggcttcctccttcttgacaggttctgttgcaaaatgtgaaaatgaaggtgaagtcctccagattccatttatcacagacaacccttgcataatgtgtgtctgcttgaacaaggaagtgacatgtaagagagagaagtgccccgtgctgtcccgagactgtgccctggccatcaagcagaggggagcctgttgtgaacagtgcaaaggtgattgatgtcttggccgtcttctcttctggctgctgcttcaggcatttttatttctctttctctcaccttccttttcactcagcttttggctggggtgcacatgggtggggaggagaagtagggtgtgtgtgtgtgtgtgtgtgtgtatgtgtgtgtttgtgtgtatgtg

SEQ ID NO: 8607 - DNA, 568 bp, Homo sapiens
attacaaactcatgaagcaggaaagtaaagcttggatttttttccaaggctgttagggaggttgagaggcttaatagataattctggactgaggttattttacacaatggatataaggaaatatgatgctggggtgattgaggctggcctctgggtgagcctcttccataccatccctccagggatgcctgagttccagtctgagggtcactgcactttggagtgcctggaagaggctctggaagccgaaaagccaagtggaattcatgtgtttgctgttcttctccatgctcacctggctggcagaggcatcaggctgcgtcattttcgaaaagggaaggaaatgaaattacttgcctatgatgatgattttgacttcaatttccaggagtttcagtatctaaaggaagaacaaacaatcttaccaggagataacctaattactgagtgtcgctacaacacgaaagatagagctgagatgacttggggaggactaagcaccaggagtgaaatgtgtctctcataccttctttattacccaagaattaatcttactcgatgtgcaagt

SEQ ID NO: 8608 - DNA, 4841 bp, Homo sapiens
gagagaaaggccgagacggagggagccagcggcggccgaggggctggtccaggcgcggccgctaagaggagaccaagaggcgggggctgcacttgacaaccagcatgccgagatggcacaccttgggcccaccccacctccacatagccttaattacaaatcagaggacaggcttagtgagcaagactggccagcatatttcaaggtcccatgttgtggggttgatacatctcaaattgagtcagaagaggcagaagtggatgtgagagaaagagagacacagagagacagagagccaaagagggcaagagacttgactttaagagactcctgtactgacaactccatgcagttcggaaccagaacgactacggctgaaccagggttcatggggacatggcaaaacgctgatactaacctcttattcagaatgtcccaacaggccatccgttgcacactggtaaactgcacatgtgaatgttttcagccagggaagattaacctgaggacttgtgatcagtgtaaacatggctgggtggcacatgccttggataagctcagcacgcagcacctgtaccaccccacccaagtggagattgtgcagtccaacgtcgtgtttgacatcagcagcctgatgctctatgggacacaagcagtgcctgtgcggctaaagatcctgctggaccgtctcttcagcgtcctgaagcaagaggaggtactgcacatactgcacggccttggctggactctgcgggactatgtccgaggatacatccttcaggatgctgctggcaaggtgctggaccgctgggccatcatgtctcgagaagaggaaatcatcacccttcagcagtttctgcggtttggagaaaccaaatccattgtggagctgatggcaattcaggagaaagaagggcaggccgtggctgtaccatcttcaaagacagactcagatataaggactttcattgagagcaataatcgcaccaggagtcccagcctccttgctcacttagagaacagcaatccttccagcattcatcacttcgaaaacatcccaaacagccttgcatttctgcttccattccagtacataaaccctgtctcagcaccactgctagggttgcctccaaatgggctactgttagagcaaccagggttgaggctgcgggaacccagcctttcaactcagaatgaatataatgagagcagcgaatccgaagtttctcccacaccttataagaatgatcaaacacccaatagaaatgccctgaccagcattactaatgtggagcccaaaaccgagccagcctgtgtctctcccattcagaattctgccccagtcagtgatctaaccaaaactgaacacccaaaaagctcattccggattcatcggatgagaaggatggggtcagcctctaggaaaggaagagtgttctgtaatgcatgtgggaagacattctatgacaaaggtactctcaaaattcattacaatgctgttcacctgaagatcaaacatcgatgcaccattgaaggttgcaacatggtctttagctccctccgaagtcgtaatcgccacagtgcaaaccccaatcctcgccttcacatgcctatgctaaggaataaccgagataaagatttaattcgggccacctcaggagctgccacccctgtcatagcaagtacaaaatcaaatctggcactcacaagccctggccgacccccaatgggttttaccactccccctctagaccctgtcttgcaaaatcctctccctagccagctagtattttctgggctaaagactgtacaaccagttcctccattttatagaagtttactcactccaggggaaatggtgagtcctccaacctccctcccaaccagtcccatcattccaaccagtggtaccatagagcagcaccccccgccaccctctgagccagtagtgccagcagtgatgatggccacccatgagcccagtgctgacctggcacccaagaaaaagcccaggaagtcaagcatgcctgtgaagattgagaaggaaattattgataccgccgatgagtttgatgatgaagatgatgaccccaatgatggtggagctgtggtcaatgacatgagccatgacaatcattgtcactcccaagaggagatgagcccaggcatgtctgtgaaggacttttctaagcataacaggacccggtgcatttcaaggactgaaataaggagggccgacagcatgacttctgaagaccaagaacctgagcgggactatgagaacgagtctgagtcttcggagcccaaactgggcgaggaatccatggaaggggatgagcacattcacagcgaagtgagtgaaaaagtcctgatgaatagtgagaggcctgatgagaaccacagtgagccctctcaccaggacgtcatcaaggtgaaggaagaatttacagaccccacttacgacatgttttacatgagccagtatggactgtacaatggtgggggtgccagcatggccgccttgcatgagagctttacatcgtctctgaattatggcagccctcaaaagttctccccagaaggtgacctatgttctagcccagaccccaaaatctgttatgtgtgcaagaagagtttcaaaagctcctacagtgtgaaacttcactacaggaacgttcacttgaaagagatgcacgtctgcacagtggctggttgcaatgctgcattcccctctcgccgaagccgagacagatactgggagaagagcaatgagcaaaacggtctccttgtatcatggggagagactctgtcaagcctaaagtgagcctcggatcttcctaatgacctcctgctggcccagctggatgcaagacaagctcgtttaagcctctgctgacctttcactcctccactacaagaactgcaccactcatttccaccgtcttcagaactgtgcaccaaatagaccacaaagcttcatggctgacgaatgatttccttttcatgatgcaaagagatttttacaaatttctattgatgagagttaacattaagtctcttgtggcattataacctctgttgcacaaatacaatgcttctatataactcttatttttaccttccttataaaggaacaatctactgttcttgccagcattatcttgaaaattcaggccaaaatatctgagcagaatgcacatactgagtgcaccggtggtatttttcatgaagagaccactttgaaagggtcttcctgatttccacctccctcagaatctatctgaccttctcacagactttattggtgtgaatctttcttatatttaaccatttatttgagatgctcatttttgtagcccatcttttctttttaaaaaacatgggctggtttctacccagaagagggtggtaagactgtacatgtacgttaacattcacttgtataactcagcaaaagattagaaagctgatcttattgtcacaagacacagtgccaacataaacctacatcgtaaactgttgaccaaagaactcgatgacatgggcctggactcgtcgcagccctcccttagcaaggacctccgcgatgaatttttggtgaagatatatggtgcccagcaccccatggggctcgatgtcagggaagacgcctcctctcccgcagggactgaagactcccacctgaacgggtatgggagaggcatggcagaggactacatggtccttgacttgagcaccacctccagcctccagtccagcagcagtatccattcctccagagaatccgacgcaggcagcgatgaggggattcttctcgatgacattgacggggcgagtgacagtggggagtcggcacacaaggccgaggcccctgccctccctggcagcctaggggctgaagtttcaggatctcttatgttcagcagcttgtctgggagcaatggtgggatcatgtgcaacatttgccacaaaatgtacagcaacaaggggaccctgagagtgcactacaaaactgtgcatttgagagaaatgcacaagtgcaaagtcccaggttgcaatatgatgttttcctctgtacgaagccgaaatcggcacagtcagaaccctaatctccacaaaaacattcccttcacttcagtagattagtctcagaatggacactacaaatgccagctctcaccagatggcctacgtgtttgaactgccatagtcagtgtgcgcttatgtacttggggtgtgtgtgtgtgtgtgtgtgtgtgtgcatttatgtatgctctgtggctacatatacacacacgtatttccttgagataaacaagataaacactaggtgcttttgaatttttttcacttccctttatagttttgggaaaggagtgggatctttgatttcagggtgaaaacagagtacccctttaaacacacacacacacacatgcacatacacacacacacacacacacacacacagtgtgcaactagccccagttttgacagaataattcttggtcttccccaaagagacaatttgttgtacccatgactgttgcctgcaaaaataaaagggaaaaaaaagaaaaaagaaacaaaaaggaacttcttatagttgtcttttgtgaactttaaggttttgaaagaatcttcaattaaagcatggcagattcacctgtaaatatttagccttgaggggccattgatgtaaaacaattgtattgatggttgtttaacttttttgtttaatttttacagttacatccagctgttagatatgcaggaaaagatagtttgctggctagctctattcatttatgttagcattaatgcacatttttaaaaaaaga

SEQ ID NO: 8609 - DNA, 625 bp, Homo sapiens
ggtcttgctgcctgccagatgttatatccacatctggatctgccaagggcaagacagaggagtacaaaaagggacagggctcacattcttccccaaatgtagtcagcataacagaggaagaggatgcagttgaagccctttctaatcctgtcccagaaataataaaactgaggattaaagaagcaaagcaatctgcctcagcttctctcagcctagcccagcatcactatggtggacgctttcctgggcacctggaagctagtggacagcaagaatttcgatgactacatgaagtcactcggtgtgggttttgctaccaggcaggtggccagcatgaccaagcctaccacaatcatcgaaaagaatggggacattctcaccctaaaaacacacagcaccttcaagaacacagagatcagctttaagttgggggtggagttcgatgagacaacagcagatgacaggaaggtcaagtccattgtgacactggatggagggaaacttgttcacctgcagaaatgggacgggcaagagaccacacttgtgcgggagctaattgatggaaaactcatcctgacactcacccacggcactgcagtttgcactcgcacttatgagaaagagg

SEQ ID NO: 8610 - DNA, 535 bp, Homo sapiens
ttctggggtgctctgcagtggaggcctgtgctgtccacgtgtaatgtcagcccggtgaggcgaggacaggtcacggcagctcagccagggatgctgtgtccgtacgccgacctgcgctggggctcccttgagctggctgtcccaccgcctcattcccggggcacccacgtgggaaagctctgagacgtgtcccagggtgggcttgggggacccctttctccatgctgtgcatctgggggccgccagactcaggagcagaggccgcccctcctatgcgatcatgggaccccttcccccgggggctggatgcaagcaggtgtgcccgggagctgtgttcagctgccgccccatcctctcctctccctagtacacgctgtgggcagccgtctgggtcacctggaacgtcttcatcatctgcttctacctggaagtcggtggcctcttaaaggggctctctgctctggccagtgtagcacaggtgggcactggggcaggtgcccagccaggcagacgggcccccgcttcctggaaccac

SEQ ID NO: 8611 - DNA, 468 bp, Homo sapiens
agcaatcagcatgacagcctccagccaagtaatctggagtcatgagagctgctaggggagcaacatgaatcatgacggtccctgggaatttcctgataactaacctgggagtttcgggagccgccgtctagcgccccgacctcgccaccatgagagccctgctggcgcgcctgcttctctgcgtcctggtcgtgagcgactccaaaggcagcaatgaacttcatcaagttccatcgaactgtgactgtctaaatggaggaacatgtgtgtccaacaagtacttctccaacattcactggtgcaactgcccaaagaaattcggagggcagcactgtgaaatagataagtcaaaaacctgctatgaggggaatggtcacttttaccgaggaaaggccagcactgacaccatgggccggccctgcctgccctggaactctgccactgtccttcagcaaacgtaccatgccc

SEQ ID NO: 8612 - DNA, 985 bp, Homo sapiens
attggaggctcctcgcgcaacctaatgcgggtgtccgggcccgagcgcttcccgcgcagccaggccttgtcggtgcagcagccccgctcctccccaacacgcacacacccggtgttcgcaagtgcggctcaccaagggagatccaagggggcaaaaagttatgtataaatccgagagccactggggaaagagggtcgtggtattgtaagcccagccggtagtgcccattctttttggggttaaaggtatgtctggatttagttctaggtgtgacggctgtgtgtctgtctgtgtgtgtacaaggctgtgtgcatctgcggtgtcagtgtgtgactttgggtatgtttgtgtgtcggtgggaacgtgttaggtccacgtgccggtgggtgtatgtgaatgtgtctggttgggtggcctcctggcctacctttgtcatccctggggcccgacagctctggggtctggccaggccgctccagggcagtgggtgagcgccgctcttcccgctcgcaggcaaacctctactctggagccccttcttgcagaggcctctgcataaaaggaaaggcggccaggtgagattctccaacgaccagaccatcgagctggagaagaaattcgagacgcagaaatatctctctccgcccgagaggaagcgtctggccaagatgctgcagctcagcgagagacaggtcaaaacctggtttcagaatcgacgcgctaaatggaggagactaaaacaggagaaccctcaaagcaataaaaaagaagaactggaaagtttggacagttcctgtgatcagaggcaagatttgcccagtgaacagaataaaggtgcttctttggatagctctcaatgttcgccctcccctgcctcccaggaagaccttgaatcagagatttcagaggattctgatcaggaagtggacattgagggcgataaaagctattttaatgctggatgatgaccactggcattggcatg

SEQ ID NO: 8613 - DNA, 585 bp, Homo sapiens
gtgatcgaggagttctacaaccagacatgggtccaccgctatggggagagcatcctgcccaccacgctcaccacgctctggtccctctcagtggccatcttttctgttgggggcatgattggctccttctctgtgggccttttcgttaaccgctttggccggcggaattcaatgctgatgatgaacctgctggccttcgtgtccgccgtgctcatgggcttctcgaaactgggcaagtcctttgagatgctgatcctgggccgcttcatcatcggtgtgtactgcggcctgaccacaggcttcgtgcccatgtatgtgggtgaagtgtcacccacagcccttcgtggggccctgggcaccctgcaccagctgggcatcgtcgtcggcatcctcatcgcccaggcagctggatgagacttccaaacctgacagatgtcagccgagccgggcctggggctcctttctccagccagcaatgatgtccagaagaatattcaggacttaacggctccaggattttaacaaaagcaagactgttgctcaaatctattcagacaagcaacaggttttataatttttttatta

SEQ ID NO: 8614 - DNA, 582 bp, Homo sapiens
actggagaggaggcagggacagacccagcagcacccacctgagcgagaagagcagacaccgtgctcctggaatcacccagcatgttgcaaggtctcctgccagtcagtctcctcctctctgttgcagtaagtgctataaaagaactccctggggtgaagaagtatgaagtggtttatcctataagacttcatccactgcataaaagagaggccaaagagccagagcaacagttcctgtcatccatgaaaataagctgagtccatcaacctctacttatctaggcccacatttgggggaaatttatagcctgggattactgacagcagagcagacctcaacaactgaggatttaagcaaagaacaatttgaaactgaattaaagtataaaatgacaattaatggaaaaattgcagtgctttatttgaaaaaaaacaagaacctccttgcaccaggctacacggaaacatattataattccactggaaaggagatcaccacaagcccacaaattatggatgattgttattatcaaggacatattcttaatgaaaaggtttctgacgctagcatcagcacatgta

SEQ ID NO: 8615 - DNA, 735 bp, Homo sapiens
gaaggaaaaagagcaacagatccagggagcattcacctgccctgtctccaaacagccttgtgcctcacctacccccaacctcccagagggagcagctatttaaggggagcaggagtgcagaacaaacaagacggcctggggatacaactctggagtcctctgagagagccaccaaggaggagcaggggagcgacggccggggcagaagttgagaccacccagcagaggagctaggccagtccatctgcatttgtcacccaagaactcttaccatgaagaccctcctactgttggcagtgatcatgatctttggcctactgcaggcccatgggaatttggtgaatttccacagaatgatcaagttgacgacaggaaaggaagccgcactcagttatggcttctacggctgccactgtggcgtgggtggcagaggatcccccaaggatgcaacggatcgctgctgtgtcactcatgactgttgctacaaacgtctggagaaacgtggatgtggcaccaaatttctgagctacaagtttagcaactcggggagcagaatcacctgtgcaaaacaggactcctgcagaagtcaactgtgtgagtgtgataaggctgctgccacctgttttgctagaaacaagacgacctacaataaaaagtaccagtactattccaataaacactgcagagggagcacccctcgttgctgagtcccctcttccctggaaaccttccacc

SEQ ID NO: 8616 - DNA, 645 bp, Homo sapiens
gggactgtgaggggcgcttctgactttggacttgagcactgcctgggacctgtgctgagagagcgctagcatgtctcagtggaatcaagtccaacagttagaaatcaagtttttggagcaggtggatcaattctatgatgacaactttcccatggaaattcggcatctgttggcccaatggattgaaaatcaagactgggaggcagcttctaacaatgaaaccatggcaacgattcttcttcaaaacttgttaatacaactggatgaacagttaggtcgtgtttccaaagagaaaaacctactcttgatacacaatctaaaaagaattaggaaggtccttcagggaaaatttcatggaaatccaatgcatgtagctgtggttatttcaaactgtttaagggaagagaggagaatattggctgcagccaacatgcctgtccaggtaatattttctgaccttgtgatcttgttatcaccttgaactcaatttttctgaaacagaaattattatctttggtagggtacagtggctcacacctgtaatcctaacactttgggaggcaaaggtgggaggatcatttgaagccaagagtttgagaccagtctggccaatgcagcaagaccctgtctccaaaaaaaaaaaaa

SEQ ID NO: 8617 - DNA, 5788 bp, Homo sapiens
cactggtaaaaatgtattatgcatccacagggctatatattaaaatcagtattaatgttggaaatgtcatatcccttagggacgttcattataatagagaaaaaagggacaaaatattaaacaacatagatgagtttattcaaatctaatggttacgggagtgttgctaagtgtttagacatgtaacttgcatttgaatcaatgaacatttgctccggaattgtctccaggggttggagaatggagtagtgagaggatgggtagcaaaaacatttagtagtgtcagttggcttttgcaaaactaacttctcccagatttggggaaaagggaaatgtttaaggaacctaggaagacacacatgtttgtaaaccatgccagtagttatgctaatttttattattttatttcagatgttactttaagcttactcccttcaaacgaaacaggtaatatcaagtgatttctaaatgtaatagcttcttctgcagcctcttgagtgtcttgcttgtgcagtctactgggttactaaagagttttcttttgcctccttgccctttttcctgtgccttcaaccattgatttatgacccctttgactttgacattgaactataattctgtcaccacactcccaaacttccaaaggatggccatagcactccatttaaaatagcatgtattatttttgtgattataatagtgatacatattagctcataaagatggagaatatagagaaatgcaaagaagaaaatacaaatcatctttaatgttactttcctaagactatgactgttaacaatttggtctatttccattcagtatcatttatacatatatttatatacatatactcttatatcctttgcaaaatagtcataatttacatagatttttgtatcttgcccatttgacttaatattacgttagaagtatattccagtgtcccttactattatgacttgataatattccattttgtaccatatgttgaactttaaagttgtttctatctttttaatagaagttattgcaatgaacattctggtgccaacatctttgcattcatttcttatttctgtaagatacattctaaggattgcagtatgcaaggattgcattctaagggtcagcagtatgaatattgtaagactcttgatactactgcttggttaccttctagaaaggtcgtgcctagcgacattcctgtccgcagtggatgagaatgtctgtcactgtacctttgctgagactgtatcatatcttattaaatctttctctcaacgcttaggttttatttttcattcatgattactagtgaagttaaacatttttaccccagagcactttagttaccaaaaccagaagttcatttcacagttgtattttgtttgctctgaaaaggaaactatcagggcaaacaaaataatatatttaaaagatttttttttttttgagacggagtctctctctgtcatccaggctggagtgcagtggcgccttcttggctcactgcaagctccgcctcccgggttcacgccattctcctgccttagcctcccgagtagctgggactacaggtgcccgccaccacgcctggctaattttttgtatttttagtagagatggggtttcactgtgttagccaggatagtctcgatctcctgaccttgtgatccgcccgcctcagcctcccaaagtgctgggattacaggcgtgagccacggcacccggacctaaaagattcttaatgacaatgtgaaatgctatcagccttcataattaccacccatcattggctcatgggtcacacattgaaacctgacagtttcagaaacctcatttgtgtgtctttgttactgatgagtttctgccaggataacatcatcattcttaagtgtgtttccaatctctgagcttggccttttcttcagaatttgcccatccaccctaggtgacagagcttcggtgaaaatctatgccctgaacacagcctctttccattggccatttttacagcaaagatttctgtacctgcttctccgttacctggggaatgaaccatgggctctgtccccaaaacgtgtttggaagacatttctaaagtttgcttcttcagggcatgttaatatttgcctgtgagtcactcactttgaacagtcttggttctgctgtgggcgtgttatgtgattgtgtataggtggatgatctcgacctctctgagaatagcattctctatcagtacaatggggatagtattatgttaactcctaaagaagatagcgagacacttgattgtataatagcaatactttacatcccatgtgtactgtttcacattaatttttattctgaattacctgtttttacaacctatcacctgaaggtcccgatagtggcttaattctacatatctgaagtgtaagtccacatcatttgtctagcagcagtgtgtggaaagtaaagtagaattacacaggcagtggggtgtgtaatgggtgtgatctaactgcgtaaacatggaactccaactcccagactcaccctgtgccaatgctacatgatccgtggatgcggttcctattcattctgctgctgagatgaccgatagtgtcttaaaggtgtcaacagtgtgactttttttttagcacttcactaaaatgatactcatggcaaattgtttttaaaaaacaagcaatgattattctctaatatttaagttgtttctttgcagaaaaaactaaaatcactatagtaaaaaccttcaatgcatcaggtatgacttattatcaatatcaagactttcctttttataactaaagtaaaattaaacaaatggctggtgtttataatttctttctcttttttccaaacttttcaagataaaatctggtcttaacaaacagatgtgtatgcactgggtacctgaaattgtactaggtgtttggggctatataataatgatcagacacagagcctaccctcaagaatcttctagtctatgggtggagacaaggcaaaaaaatagataactaacatgaacatgcatgcagataaaggcaatgattatacaagtattactgacatggttaagaggcataggagtagagggggatgcaattaatgaagaagttagaggaatgaacctcaaatttttttttcctgagacaagatctcactcagtggcccaggctacagtgcagtgatgcaatcatagctcactgcagcctcaacctccttggctcaggtgatcctcccacctcagcctcctgagtagctgggactgcaggcttgtgccatcaagcacggctaatttttgtattttttgtagagacaggatttcgccacgttgcccaggctggtctcaaactcctgggctcaagtgatctgcctgcctcggcctcccagagtgctaggattacaggcctgagccactgcacctggccaaattctttttaaatcaaagaaaatgtgtacttttaagtttctgatacaagactacacacacaagacatgcttgacaaaggcttgatttcaagtagcggttggcaaactatcaccaatgggccaaatcgggctcactgcctgtttttgtgaataaagttttattggaacactaccatgcccctttgcttacatattctctatagctatttttctgctgcgtaaaacacgagtggttgcaacagagaccatatgacccacaaagcttaaatatttactatctgaccctttagaaagttttctcactcatgatttaaggaatgacctgtggccatgtacatagaggagattacagatgagaatgctagcagtaggaaaaacaaaattctcagtatgaatgaacagcaagaagacacgcatcactggaaacggagctgcagctaaaatttagaaaaagatgagatgatcgaatgaaaagtttagtaagtaatacagcaatggtttaaaggacatttacagcataactacccattataaaatctataaattctatatttgcataatatatatgttatagtgagttctatctataagcaagtatatttgcttatagacagaagaagaaatgaaatatttctcttttggtgtgggtaacactgctttggaacaatataaaaatctacagatctggtaatttggggtacctaaatttaatttgctcacaaaatcaaaactcatagctataggtgtcttcgctaaagcatgatgcctgtacatcaataaatcacactagcagaaagcatatcacatgcactaactcaaattataattttagtttgtacccaaactagttttctcatagaaaagaatttaaggatttgtaatgtgcaatggaaataaacttgcagttgggcattgcacacataattctgaccaaacaagacctaacaaggagacaaaaatatttcttaatataacaagtttttcccttggcagtttgtttaatacattatcagcatttgctcctcccatgtactatggatttcttatgctttgccaaaaggatgcaattaataaaggaaggctttttagagaagtaaaccttgagttcttttcaaattgaagaagagatacacttctcctctcaccaaaggagaaagtgtttctcaggttaatacgtataaagttttggttctgatgctcattttatctcccagtcatctctgtctcctttgtatgcctgtgtggtctgttgtcctggtcatcactccattttgccctcactaataagtaaattaaaaaatgctttttatttactggctagtatcatccactagattgtatgctccttgagggcaggatctatatctggaaactcccaaagcctgtagaatatggttaatgctcagcaaatatgttttgaattttgtagtttttgcccatgaaacaatattatgacattaatgttatttcatacatacatttgcataaagagctaggattaacattagagtgttcatagactcccctacataggaaaagaaggaggatctatgattaagggccattccatttaaagtctctacttggtttgtgttcatggtgctctgtttatactgaacaggagagggattaattgggaaggggtcaaaaattttagggaggagttaaggatcagatattgacatactaaagattagtaaagaattaagttccgtagctgacaaatgaccaacaaatgaaaactcatttctttagtctttgtggaattcatccatccaattaattccagcttataatatttctggtccacatttgatgcctacgtttatgaattctcttgacaatgcagcacataaacacgggcattgacatgcttaaccagctgggttgtgttttctttgcaggcgtcaaaccccagagaaatatctgcaatttgtcatctatttgcaatgactcagcattttttagaggtgagatcatgtttcaatatgataaagaaagcactgttccccagaatcaacatataacgaatggcaccttaactggagtcctgtctctaagtgaattaaaacgctcagagctcaacaaaaccctgcaaaccctaagtgagacttactttataatgtgtgctacagcagaggcccaaagcacattaaattgtacattcacaataaaactgaataatacaatgaatgcatgtgctgtaatagctgctttggaaagagtaaagattcgaccaatggaacactgctgctgttctgtcaggataccctgcccttcctccccagaagagttggaaaagcttcagtggtatgtaacaaacatgctgacccttctcctt

SEQ ID NO: 8618 - DNA, 1713 bp, Homo sapiens
cagggaaagacttgcttgtaactttatgaattctggatttttttttttcctttgctttttcttaactttcactaagggttactgtagtctgatgtgtccttcccaaggccacgaaatttgacaagctgcacttttcttttgctcaatgatttctgctttaagccaaagaactgcctataatttcactaagaatgtcttctaattcagatactggggatttacaagagtctttaaagcacggacttacacctattgataacacagaaaatacaggcacaagaaagatgagagagcagcacacaaccatttcgcatctttttcgtcgggcagaaccgccgcggtgcgcaggcaaggagtccttcccggcagctccgcgcagctccggttccgcgtccggggccgcagctagagcgcgctcgggccggagacgcggactgcgcgcgcacgggggacgcgcgctcgggggctcgcgcccgcgcgggcggtcttgggctcctgctgcgcgcagccccagctggccgctgccaaaatagagttgagctgggtcgggagaccacgcacgccgatccctcacagtctcccccacaccccatgggtgaattaaagagggtaaggtaggggaaagagacgctgttgcacttttctctgcaaccctggaagaactgtgtttccagctaccgcacgcgcaactcacatcgcaagggaccgaggcggtacactctgagcgtaaacagagaacacctgcagctctggaatcggtcccaccgcagagggctgggaaccggaggactgtcggtccagcccataaggggctgctggggactaaacctcaagaaaagtaccgaagaaggctctcccctggcctcagcgagactaccccaacatcctaaacctgtgcaggcacttccgggcgccggattccgggataacaaaattccagtcaatttgccgtgtctcaatttaaaatggtgaattactcctatgatgaagatctggaagagctttgtcccgtgtgtggagataaagtgtctgggtaccattatgggctcctcacctgtgaaagctgcaaggtttgctcacacattgctacctgaaaaatataatgtccaacaccaaaataaaccagtggattacttcttttaagctaaatttaggctccttttttaaagactcaactaaaaatgagggagaaagagagagtcttagggagatgattcttagaagtgtgtgtctgatttagttcaaaaggcaaagaaatttatgctgtttagaaaactttgccagtctcatggttctaaaatactttattgtagtaaagtgatatagctgtagaaagacttccatttctaacagtcctaaatattgattttgcttgacttatatatatttaaagcatcgttgttcttgaaagggaatatgacaaactatttcccaaatacattttaacttcagagtatttctgtgctataagtctaaacattctttatccacagacataaaagcctaaattcccaactgtgtgatttcatcttgatttattccaaaataattttaaggattttttgaaatttatatcataaagaccaagaaatcagattttagtttttaatataataatttttataaatatatgacctatttaagtgcatggattttaatatgtaaaatatgctatattgttaccaaaaatataaattatactttaagaattta

SEQ ID NO: 8619 - DNA, 4962 bp, Homo sapiens
atgtggccatcgcagctactaattttcatgatgctcttagctccaataattcatggtggcaagcacagtgaacgacatcctgcccttgctgctccattgcgacacgctgagcgcagcccaggaggcgctcttccacccagacatctgcttcagcagccagctgcagagcgcaccgctgctcatcgtggacaagggccccgtggagctaccagaggagttcgcggtccaggtgcccaaggagcacagattgcagcgcaagctttcagccgtgccccaattccaatggctgtggtccgcagagagctatcctgtgagagctatcctatagagcttcgctgtccaggaacagacgtcatcatgatagaaagtgccaactatggcaggactgatgacaaaatttgtgactctgaccctgctcagatggagaatatccgatgttatctgccagatgcctataagattatgtctcaaagatgcaataacagaacccagtgtgcagtggtggcaggtcctgatgtttttccagacccgtgtccaggaacctataaataccttgaagtgcagtatgaatgtgtcccttacaaagtggaacaaaaagtttttctttgtcctggactactaaaaggagtataccagagtgaacatttgtttgagtccgaccaccaatctggggcgtggtgcaaagaccctctgcaggcatctgacaagatttattatatgccctggactccctacagaactgataccctgactgagtattcatccaaggatgacttcattgctggaagaccaactacaacctacaagctccctcacagggtggatggcacaggatttgtagtgtatgatggagctttgttcttcaacaaagagcgcaccaggaacatagtaaagtttgatttgcggactaggataaagagtggagaggctatcatagcaaatgccaattaccatgatacctccccttaccgatggggaggcaaatctgacatagacctggcagtagatgagaatgggctatgggtaatctatgcaacagaacaaaacaatggtaaaattgtcattagtcaattgaacccttacaccctacggatcgaaggaacatgggatactgcatatgataaaaggtcagcttccaatgcctttatgatttgtggaattctgtatgtggtcaaatctgtatatgaggatgatgacaatgaggctactggaaataagattgactacatttacaacactgaccaaagcaaggatagtttggtggatgtaccctttcctaattcataccagtacattgcagctgtggattacaaccccagggacaacctactttatgtatggaataactatcacgtcgtgaaatattctttggattttggacctctggatagtagatcagggcaggcacatcatggacaagtttcatacatttctccgccaattcaccttgactctgagctagaaagaccctctgttaaagatatctctaccacaggacctcttggcatgggaagcactaccaccagtaccacccttcggaccacaactttgagcccaggaaggagtaccaccccgtcagtgtcaggaagaagaaaccggagtactagtaccccatctccagctgtcgaggtacttgatgacatgaccacacaccttccatcagcatcgtcccaaatcccagctctcgaagagagctgtgaggctgtggaagcccgagaaatcatgtggtttaagactcgtcaaggacagatagcaaagcagccatgccctgcaggaactataggtgtatcaacttatctatgccttgctcctgatggaatttgggatccccaaggtccagatctcagcaactgttcttctccttgggtcaatcatataacacagaagttgaaatctggtgaaacagctgccaacattgctagagagctggctgaacagacaagaaatcacttgaatgctggggacatcacctactctgtccgggccatggaccagctggtaggcctcctagatgtacagcttcggaacttgaccccaggtggaaaagatagtgctgcccggagtttgaacaagcttcagaaaagagagcgctcttgcagagcctatgtccaggcaatggtcgagacagttaacaacctccttcagccacaagctttgaatgcatggagagacctgactacgagtgatcagctgcgtgcggccaccatgttgcttcatactgtggaggaaagtgcttttgtgctggctgataaccttttgaagactgacattgtcagggagaatacagacaatattaaattggaagttgcaagactgagcacagaaggaaacttagaagacctaaaatttccagaaaacatgggccatggaagcactatccagctgtctgcaaataccttaaagcaaaatggccgaaatggagagatcagagtggcctttgtcctgtataacaacttgggtccttatttatccacggagaatgccagtatgaagttgggaacggaagctttgtccacaaatcattctgttattgtcaattcccctgttattacggcagcaataaacaaagagttcagtaacaaggtttatttggctgatcctgtggtatttactgttaaacatatcaagcagtcagaggaaaatttcaaccctaactgttcattttggagctactccaagcgtacaatgacaggttattggtcaacacaaggctgtcggctcctgacaacaaataagacacatactacatgctcttgtaaccacctaacaaattttgcagtactgatggcacatgtggaagttaagcacagtgatgcggtccatgacctccttctggatgtgatcacgtgggttggaattttgctgtcccttgtttgtctcctgatttgcatcttcacattttgctttttccgggggctccagagtgaccgtaacaccatccacaagaacctctgcatcagtctctttgtagcagagctgctcttcctgattgggatcaaccgaactgaccaaccaattgcctgtgctgttttcgctgccctgttacatttcttcttcttggctgccttcacctggatgttcctggagggggtgcagctttatatcatgctggtggaggtttttgagagtgaacattcacgtaggaaatacttttatctggtcggctatgggatgcctgcactcattgtggctgtgtcagctgcagtagactacaggagttatggaacagataaagtatgttggctccgacttgacacctacttcatttggagttttataggaccagcaactttgataattatgcttaatgtaatcttccttgggattgctttatataaaatgtttcatcatactgctatactgaaacctgaatcaggctgtcttgataacatcaactatgaggataacagacccttcatcaagtcatgggttataggtgcaatagctcttctctgcctattaggattgacctgggcctttggactcatgtatattaatgaaagcacagtcatcatggcctatctcttcaccattttcaattctctacagggaatgtttatatttattttccattgtgtcctacagaagaaggtacgaaaagagtatgggaaatgcctgcgaacacattgctgtagtggcaaaagtacagagagttccattggttcagggaaaacatctggttctcgaactcctggacgctactccacaggctcacagagccgaatccgtagaatgtggaatgacacggttcgaaagcagtcagagtcttcctttattactggagacataaacagttcagcgtcactcaacagaggagccatggctaatcatcttataagcaatgctctgcttcgtccgcatggtactaacaatccctataatacattgcttggggaaccggcggtctgtaacaacccttctgtcagcatgtacaacgcacaagaggggcttctgaacaatgccagggatacaagtgtcatggatactctaccactgaatggtaaccatggcaatagttacagcattgccagcggcgaatacctgagcaactgtgtgcaaatcatagaccgtggctataaccataacgagaccgccctagagaaaaagattctgaaggaactcacttccaactatatcccttcttacctgaacaaccatgagcgctccagtgaacagaacaggaatctgatgaacaagctggtgaataaccttggcagtggaagggaagatgatgccattgtcctggatgatgccacctcgtttaaccacgaggagagtttgggcctggaactcattcatgaggaatctgatgctcctttgctgcccccaagagtatactccaccgagaaccaccagccacaccattataccagaaggcggatcccccaagaccacagtgagagctttttccctttgctaaccaacgagcacacagaagatctccagtcaccccatagagactctctctataccagcatgccgacactggctggtgtggccgccacagagagtgttaccaccagcacccagaccgaacccccaccggccaaatgtggtgatgccgaagatgtttactacaaaagcatgccaaacctaggctccagaaaccacgtccatcagctgcatacttactaccagctaggtcgcggcagcagtgatggatttatagttcctccaaacaaagatgggacccctcccgagggaagttcaaaaggaccggctcatttggtcactagtctatagaagatgacacagaaattggaaccaacaaaactgctaacaccttgttgactgttctgagttgatataagcagtggtaataatgtgtgtactcctaaatctttatgctgtcctctaaagacaaacacaaactctcagacttttttttttttaatgggatttttaggtcagcccaggggagaaagataactgctaaaattcccctgtaccccatcctttctt

SEQ ID NO: 8620 - DNA, 874 bp, Homo sapiens
cggagaagaggagtgagaaggccggggaggcaggccctgctgtcttcctgcaggccggcagcctgctggcagtggaggaccaggccgtccaggaaaggaaggggtcaggaggtcgggcagggcctcagcagctgttagccgagcaacttgctgatgaccgtatggcactggtgtcaggcatcagcttagatccagaagcagcgattggtgtgacaaaacggccacctcctaagtgggtggatggagtggatgaaattcagtatgatgttggccggattaagcagaagatgaaagaattggccagccttcatgacaagcatttaaacagacccaccctggatgacagcagcgaagaggaacatgccattgagataactacccaagagatcactcaggcatgaagaatcgagaggaaagatcccagcattttttcgacacatcagtaccactaatggatgatggagacgataacactctttaccatcggggttttacagaggaccagttagttctggtggagcagaacacactgatggtggaagagcgggaacgagagattcgccagattgtacagtccatttctgacctgaatgaaatattcagggacttaggggcgatgattgtagaacagggtacagtccttgacagaattgactataacgttgaacagtcctgtatcaaaactgaagatggtttgaaacagcttcacaaggcagaacagtatcaaaagaagaatcggaagatgcttgtgattttaatattatttgtcatcatcattgtgctcattgttgtcctcgttggcgtgaagtctcgataagtggcattgggttttcgtgtgtgccgcgcgtgtggatctcccgggtgtgaggggctt

SEQ ID NO: 8621 - DNA, 606 bp, Homo sapiens
gtggagctgccagagtaaagcaaagagaaaggaagcaggcccgttggaagtggttgtgacaaccccagcaatgtggagaagcctggggcttgccctggctctctgtctcctcccatcgggaggaacagagagccaggaccaaagctccttatgtaagcaacccccagcctggagcataagagatcaagatccaatgctaaactccaatggttcagtgactgtggttgctcttcttcaagccagctgatacctgtgcatactgcaggcatctaagtaagacagtctttctgtggcttaaaataccttaaggggaaggctattaaatacacacacgcatatagacataaaataaaagtgtaaataatgtattaagtcacacttttagaaaaactatgtgtttgcatagaacatattagaagagagaaactaggatgatacacaccaaaatgtttacagtgggtttcctagggttatggaaattttttcttctttttgtgcacctatattttataacttcctactaaatatgtattacttgtgtaatgaaaatgctctaaaatgtacttctgcaaatagaacagttacttcaatacaagaggcagagaa

SEQ ID NO: 8622 - DNA, 5139 bp, Homo sapiens
caactccgagcacacggccgtcatcagcctctgctcaggaatgctgggcacattccggtctcatgatggggattattttattgaaccactacagtctatggatgaacaagaagatgaagaggaacaaaacaaaccccacatcatttataggcgcagcgccccccagagagagccctcaacaggaaggcatgcatgtgacacctcagaacacaaaaataggcacagtaaagacaagaagaaaaccagagcaagaaaatggggagaaaggattaacctggctggtgacgtagcagcattaaacagcggcttagcaacagaggcattttctgcttatggtaataagacggacaacacaagagaaaagaggacccacagaaggacaaaacgttttttatcctatccacggtttgtagaagtcttggtggtggcagacaacagaatggtttcataccatggagaaaaccttcaacactatattttaactttaatgtcaattgtagcctctatctataaagacccaagtattggaaatttaattaatattgttattgtgaacttaattgtgattcataatgaacaggatgggccttccatatcttttaatgctcagacaacattaaaaaacttttgccagtggcagcattcgaagaacagtccaggtggaatccatcatgatactgctgttctcttaacaagacaggatatctgcagagctcacgacaaatgtgataccttaggcctggctgaactgggaaccatttgtgatccctatagaagctgttctattagtgaagatagtggattgagtacagcttttacgatcgcccatgagctgggccatgtgtttaacatgcctcatgatgacaacaacaaatgtaaagaagaaggagttaagagtccccagcatgtcatggctccaacactgaacttctacaccaacccctggatgtggtcaaagtgtagtcgaaaatatatcactgagtttttagacactggttatggcgagtgtttgcttaacgaacctgaatccagaccctaccctttgcctgtccaactgccaggcatcctttacaacgtgaataaacaatgtgaattgatttttggaccaggttctcaggtgtgcccatatatgatgcagtgcagacggctctggtgcaataacgtcaatggagtacacaaaggctgccggactcagcacacaccctgggccgatgggacggagtgcgagcctggaaagcactgcaagtatggattttgtgttcccaaagaaatggatgtccccgtgacagatggatcctggggaagttggagtccctttggaacctgctccagaacatgtggagggggcatcaaaacagccattcgagagtgcaacagaccagaaccaaaaaatggtggaaaatactgtgtaggacgtagaatgaaatttaagtcctgcaacacggagccatgtctcaagcagaagcgagacttccgagatgaacagtgtgctcactttgacgggaagcattttaacatcaacggtctgcttcccaatgtgcgctgggtccctaaatacagtggaattctgatgaaggaccggtgcaagttgttctgcagagtggcagggaacacagcctactatcagcttcgagacagagtgatagatggaactccttgtggccaggacacaaatgatatctgtgtccagggcctttgccggcaagctggatgcgatcatgttttaaactcaaaagcccggagagataaatgtggggtttgtggtggcgataattcttcatgcaaaacagtggcaggaacatttaatacagtacattatggttacaatactgtggtccgaattccagctggtgctaccaatattgatgtgcggcagcacagtttctcaggggaaacagacgatgacaactacttagctttatcaagcagtaaaggtgaattcttgctaaatggaaactttgttgtcacaatggccaaaagggaaattcgcattgggaatgctgtggtagagtacagtgggtccgagactgccgtagaaagaattaactcaacagatcgcattgagcaagaacttttgcttcaggttttgtcggtgggaaagttgtacaaccccgatgtacgctattctttcaatattccaattgaagataaacctcagcagttttactggaacagtcatgggccatggcaagcatgcagtaaaccctgccaaggggaacggaaacgaaaacttgtttgcaccagggaatctgatcagcttactgtttctgatcaaagatgcgatcggctgccccagcctggacacattactgaaccctgtggtacagactgtgacctgaggtggcatgttgccagcaggagtgaatgtagtgcccagtgtggcttgggttaccgcacattggacatctactgtgccaaatatagcaggctggatgggaagactgagaaggttgatgatggtttttgcagcagccatcccaaaccaagcaaccgtgaaaaatgctcaggggaatgtaacacgggtggctggcgctattctgcctggactgaatgttcaaaaagctgtgacggtgggacccagaggagaagggctatttgtgtcaatacccgaaatgatgtactggatgacagcaaatgcacacatcaagagaaagttaccattcagaggtgcagtgagttcccttgtccacagtggaaatctggagactggtcagagtgcttggtcacctgtggaaaagggcataagcaccgccaggtctggtgtcagtttggtgaagatcgattaaatgatagaatgtgtgaccctgagaccaagccaacatctatgcagacttgtcagcagccggaatgtgcatcctggcaggcgggtccctggggacagtgcagtgtcacttgtggacagggataccagctaagagcagtgaaatgcatcattgggacttatatgtcagtggtagatgacaatgactgtaatgcagcaactagaccaactgatacccaggactgtgaattaccatcatgtcatcctcccccagctgccccggaaacgaggagaagcacatacagtgcaccaagaacccagtggcgatttgggtcttggaccccatgctcagccacttgtgggaaaggtacccggatgagatacgtcagctgccgagatgagaatggctctgtggctgacgagagtgcctgtgctaccctgcctagaccagtggcaaaggaagaatgttctgtgacaccctgtgggcaatggaaggccttggactggagctcttgctctgtgacctgtgggcaaggtagggcaacccggcaagtgatgtgtgtcaactacagtgaccacgtgatcgatcggagtgagtgtgaccaggattatatcccagaaactgaccaggactgttccatgtcaccatgccctcaaaggaccccagacagtggcttagctcagcaccccttccaaaatgaggactatcgtccccggagcgccagccccagccgcacccatgtgctcggtggaaaccagtggagaactggcccctggggagcatgttccagtacctgtgctggcggatcccagcggcgtgttgttgtatgtcaggatgaaaatggatacaccgcaaacgactgtgtggagagaataaaacctgatgagcaaagagcctgtgaatccggcccttgtcctcagtgggcttatggcaactggggagagtgcactaagctgtgtggtggaggcataagaacaagactggtggtctgtcagcggtccaacggtgaacggtttccagatttgagctgtgaaattcttgataaacctcccgatcgtgagcagtgtaacacacatgcttgtccacacgacgctgcatggagtactggcccttggagctcgtgttctgtctcttgtggtcgagggcataaacaacgaaatgtttactgcatggcaaaagatggaagccatttagaaagtgattactgtaagcacctggctaagccacatgggcacagaaagtgccgaggaggaagatgccccaaatggaaagctggcgcttggagtcagtgctctgtgtcctgtggccgaggcgtacagcagaggcatgtgggctgtcagatcggaacacacaaaatagccagagagaccgagtgcaacccatacaccagaccggagtcggaacgcgactgccaaggcccacggtgtcccctctacacttggagggcagaggaatggcaagaatgcaccaagacctgcggcgaaggctccaggtaccgcaaggtggtgtgtgtggatgacaacaaaaacgaggtgcatggggcacgctgtgacgtgagcaagcggccggtggaccgtgaaagctgtagtttgcaaccctgcgagtatgtctggatcacaggagaatggtcagaggtaccgtcctgggaactgtaaccatcgtcagctcagccatggcctgagagtggcagagggatgagtggagggatgagtgcaggaatgtgggagacttgaggctacccgcccgatttgccactgtgaactgtgtgttttctgacaagtcctcagctttcccaagctagaattccttgtatgcaaagcgggagagatgtaagagatggtctctaagtcccttcaggtctacattctgtgattcaccttgatgtcctattggcataaagaagaaattattacaggggctgcaaactcataggatgctgtgaggtgcctgaagacagttaagtataagaaaatactgtagtgccagggatacaacaaggagagatggcaactgtgacaaactagcacatgctgtgtgaagggagcagaatctctttcactccagctgtggccatgcagaaatgtggtctagcgttaccagacctgatttttcaagagaggctaaaaatctggactagtatgtgagatttcctaacttgaaaatgggggctgaaatttttggttttaaaacattgtaaggggcaaacaaacccctttcatgaaccagatgtgttgtgcctgtttaacaaacagcttcagaggaagaaaataattttctataatatccgaagtatctcaagtaccattttttcatatatcttcctgtgcacagtgcttatctagaccctttttaatggtaataaaccagtagtaatcat

SEQ ID NO: 8623 - DNA, 566 bp, Homo sapiens
ttgtgggcatcacctatgccctgaccgttgtgtggctcctggtgtttgcctgctctgctgtgcctgtgtacatttacttcaacacctggaccacctgccagtctattgccttccccagcaagacctctgccagtataggcagtctctgtgctgatgccagaatgtatggtgttctcccatggaatgctttccctggcaaggtttgtggctccaaccttctgtccatctgcaaaacagctgaggtgagtgggttatttgggttattttacaagggagtagctaataccatacaaattacacccatggccttcaattttaaggactgaaagtttccctttgctggattttgaattagccgattgccttctacaacatgttggctaagtgtgcctgagccaatgagcatagaaggtaaaacacctgttttctctagagttgcatagaaagacttcctttccaacccttcccctcttaaaagagaagtttgtagctttaggtaaagatagagcctaatggcaaaatcccccacatgaaaattttcattcctttagttaaaaaccatatca

SEQ ID NO: 8624 - DNA, 580 bp, Homo sapiens
aatcggaactgaagtcagtagcatcgcccatttgccattcactgcagtagcaaaagtagtactctgtggtgggttaatcggtttgaggcagctccttaaatgaacatttgtgtttcatttttctgttattttcccgaacatgaaaagacgataaaactgaaatggaaaagatctattccagaggggagcttcaccacttcattgacggctttaatgaagagaaaagcaactggatgcgctatgtgaatccagcacactctccccgggagcaaaacctggctgcgtgtcagaacgggatgaacatctacttctacaccattaagcccatccctgccaaccaggaacttcttgtgtggtattgtcgggactttgcagaaaggcttcactacccttatcccggagagctgacaatgatgaatctcagtaagtggattacagaacaaaaaaataaaaaatgccagtaatgtcggttctgcccctttgaactaataacatgttgtttaattatacggctttgtcatgtgttggatgaagtaggtggcttaagctagggactaggaagaggaaaaacattttttga

SEQ ID NO: 8625 - DNA, 427 bp, Homo sapiens
cccgtctggctgcagatgacttccgaaccaagtgagtgtctctgtcctgggggctgcagaagccaggactggggtaggggttggggggtttagaatctgccctcacctagcctagatggcctgaagctaacccccctatggactcctgaactctggggaggtagggaagtcttcagagatgctgaggaagctctgcctggctgcaactatttcctttgaaaggtttgagacggaacaggctctgcgcatgagcgtggaggccgacatcaacggcctgcgcagggtgctggatgagctgaccctggccaggaccgacctggagatgcagatcgaaggcctgaaggaagagctggcctacctgaagaagaaccatgaggaggaaatcagtacgctgaggggccaagtgggaggccaggtcagtgtggag

SEQ ID NO: 8626 - DNA, 2121 bp, Homo sapiens
ggccgcgggagcgttcgtcaccagcaatctgagcggtggcgcgggcggcatttaagtgtgcggaggcgcattcccgccgcgctgcgtgacgcctgggctcccggcaccggactcgggacacgcgggaggccctcccgaaatagctgccgaatgaatgacatctgaatgggactccgagtgccttacatccctgcagccccttcctcttcctacacccccagcagcaaatgaggcacacctgcagacagcagctatctctctgtggacagtggtggccgccgtgcaggctatagagaggaaggtggagatccacagccggcgactcctacacctggaaggtcggacagggacagcagagaagaaactagccagctgtgaaaagacagttaccgagcttgggaaccagctggagggcaagtgggccgtgctgggaaccctgctgcaggagtacgggctgctgcagaggcggctggagaacttggagaacctgctgcgcaacaggaacttctggatcctgcggctccctccaggtgcctgtggcatttgatgatgtctccatctacttttccactccagagtgggaaaaattagaagaatggcaaaaggaactttacaagaatatcatgaagggcaactacgagtctctcatctccatggattatgctataaatcaacctgatgtcttatctcagattcaaccagaaggggaacataatacagaggaccaggcagggccagaggaaagtgagattcccacagaccccagtgaagagcctggtatttcaacatcagatattctgtcttggattaaacaagaagaagagcctcaggttggggccccaccggagtccaaggagagtgacgtgtacaaaagcacttatgctgatgaagagcttgtcatcaaagctgaaggccttgctagatcctcgttgtgccctgaggttccagtccctttctcttctccaccagcagcagcaaaggatgctttttcagatgtggctttcaaaagccagcagtctacatccatgacaccttttggacgtccagccactgacctgcctgaagcctctgagggacaagtgacttttactcagttgggtagctatcccctcccacctccagttggcgagcaggtgttctcatgccaccactgtggcaagaatctcagccaagacatgttgctgacccaccaatgtagccatgctactgagcaccccttaccctgtgcccagtgccctaagcactttactccacaggcggacctcagcagcacctcccaggaccatgccagcgagacaccccccacctgcccacactgtgccaggacttttactcacccatcaagacttacctaccatcttcgggtccataacagcactgagcgtcctttcccctgtcctgattgccccaagcgctttgctgaccaggctcgactcaccagccaccggagagctcatgcaagcgaaaggcccttccgctgtgcccagtgcggcaggagcttcagcttgaaaatcagcctcctgctccaccagcggggtcatgcacaagagcgccctttctcctgccctcagtgtggcattgacttcaacggccactcggccctgatccgccaccagatgatccacacaggcgagcgtccttacccctgcactgactgcagtaagagcttcatgcgcaaggagcacctgctgaaccaccggcggctgcacacaggcgagcggcccttcagttgtcctcactgtggcaagagcttcatccgcaagcaccacctaatgaaacaccagcgcatccacaccggggagcggccctacccctgctcctactgtggcaggagcttccgctacaaacagacactcaaggaccacctccgttcaggccacaatggaggctgtgggggtgatagtgacccatcaggtcagccacccaacccaccaggtcccctcataactgggcttgaaacttctggcctgggtgtcaacactgaaggtctagagaccaaccagtggtatggggaagggagtggagggggagttttgtaaatccaaatctctgtggcttcatgcttgtatatgctcacagcagggcacaaaatccaagagaaggtctgtgagccccatccaa

SEQ ID NO: 8627 - DNA, 2368 bp, Homo sapiens
atgagagccagcattcataagaaacttcgcaagagcagtggaatagtgaccattctttattctgcctttgtcctggtgagcacatctgatatggcagaggaaactgaggatgcctggccgaggtgctatctccagttccttgcactcctgttaacaagcacctcagcgagagcagcagcagcgatagcagccgcagaagagccagcggggtcgcctagtgtcatgaccagggcgggagatcacaaccgccagagaggatgctgtggatccttggccgactacctgacctctgcaaaattccttctctaccttggtcattctctctctacttggggagatcggatgtggcactttgcggtgtctgtgtttctggtagagctctatggaaacagcctccttttgacagcagtctacgggctggtggtggcagggtctgttctggtcctgggagccatcatcggtgactgggtggacaagaatgctagacttaaagtggcccagacctcgctggtggtacagaatgtttcagtcatcctgtgtggaatcatcctgatgatggttttcttacataaacatgagcttctgaccatgtaccatggatgggttctcacttcctgctatatcctgatcatcactattgcaaatattgcaaatttggccagtactgctactgcaatcacaatccaaagggattggattgttgttgttgcaggagaagacagaagcaaactagcaaatatgaatgccacaatacgaaggattgaccagttaaccaacatcttagcccccatggctgttggccagattatgacatttggctccccagtcatcggctgtggctttatttcgggatggaacttggtatccatgtgcgtggagtacgttctgctctggaaggtttaccagaaaaccccagctctagctgtgaaagctggtcttaaagaagaggaaactgaattgaaacagctgaatttacacaaagatactgagccaaaacccctggagggaactcatctaatgggtgtgaaagactctaacatccatgagcttgaacatgagcaagagcctacttgtgcctcccagatggctgagcccttccgtaccttccgagatggatgggtctcctactacaaccagcctgtgtttctggctggcatgggtcttgctttcctttatatgactgtcctgggctttgactgcatcaccacagggtacgcctacactcagggactgagtggttccatcctcagtattttgatgggagcatcagctataactggaataatgggaactgtagcttttacttggctacgtcgaaaatgtggtttggttcggacaggtctgatctcaggattggcacagctttcctgtttgatcttgtgtgtgatctctgtattcatgcctggaagccccctggacttgtccgtttctccttttgaagatatccgatcaaggttcattcaaggagagtcaattacacctaccaagatacctgaaattacaactgaaatatacatgtctaatgggtctaattctgctaatattgtcccggagacaagtcctgaatctgtgcccataatctctgtcagtctgctgtttgcaggcgtcattgctgctagaatcggtctttggtcctttgatttaactgtgacacagttgctgcaagaaaatgtaattgaatctgaaagaggcattataaatggtgtacagaactccatgaactatcttcttgatcttctgcatttcatcatggtcatcctggctccaaatcctgaagcttttggcttgctcgtattgatttcagtctcctttgtggcaatgggccacattatgtatttccgatttgcccaaaatactctgggaaacaagctctttgcttgcggtcctgatgcaaaagaagttaggaaggaaaatcaagcaaatacatctgttgtttgagacagtttaactgttgctatcctgttactagattatatagagcacatgtgcttattttgtactgcagaattccaataaatggctgggtgttttgctctgtttttaccacagctgtgccttgagaactaaaagctgtttaggaaacctaagtcagcagaaattaactgattaatttcccttatgttgaggcatggaaaaaaaattggaaaagaaaaactcagtttaaatacggagactataatgataacactgaattcccctatttctcatgagtagatacaatcttacgtaaaagagtggttagtcacgtgaattcagttatcatttgacagattcttatctgtactagaattcagatatgtcagttttctgcaaaactcactcttgttcaagactagctaatttatttttttgcatcttagttattttt

SEQ ID NO: 8628 - DNA, 1160 bp, Homo sapiens
atggaaaccctttgcctcagggcatccttttggctggcactggttggatgtgtaatcagtgataatcctgagagatacagcacaaatctaagcaatcatgtggatgatttcaccacttttcgtggcacagagctcagcttcctggttaccactcatcaacccactaatttggtcctacccagcaatggctcaatgcacaactattgcccacagcagactaaaattacttcagctttcaaatacattaacactgtgatatcttgtactattttcatcgtgggaatggtggggaatgcaactctgctcaggatcatttaccagaacaaatgtatgaggaatggccccaacgcgctgatagccagtcttgcccttggagaccttatctatgtggtcattgatctccctatcaatgtatttaagctgctggctgggcgctggccttttgatcacaatgactttggcgtatttctttgcaagctgttcccctttttgcagaagtcctcggtggggatcaccgtcctcaacctctgcgctcttagtgttgacagttctaccaagatgtaaaggactggtggctcttcgggttctatttctgtatgcccttggtgtgcactgcgatcttctacaccctcatgacttgtgagatgttgaacagaaggaatggcagcttgagaattgccctcagtgaacatcttaagcagcgtcgagaagtggcaaaaacagttttctgcttggttgtaatttttgctctttgctggttccctcttcatttaagccgtatattgaagaaaactgtgtataacgagatggacaagaaccgatgtgaattacttagtttcttactgctcatggattacatcggtattaacttggcaaccatgaattcatgtataaaccccatagctctgtattttgtgagcaagaaatttaaaaattgtttccagtcatgcctctgctgctgctgttaccagtccaaaagtctgatgacctcggtccccatgaacggaacaagcatccagtggaagaaccacgatcaaaacaaccacaacacagaccggagcagccataaggacagcatgaactgaccacccttagaagcactcctcggtactcccataatcctctcggagaaaaaaatcacaaggcaactgtgagtccgg

SEQ ID NO: 8629 - DNA, 552 bp, Homo sapiens
atctgcaaccagagtaattgggatttgacaaggactgtgaaaggctgactctccctgttctctttcatgctggcaccgggcagagtgtgggaactactgcctcaatagtaagtacaaagccattgagatcccgcagtttatcggccgcagttacctgacgtatgacaacccagatatcttgaagagggtgtcaggatcaagatcaaatgtgttcatgaggtttaaaacaactgccaaggatggccttttgctgtggaggggagacagccccatgagacccaacagcgacttcatttccttgggccttcgggatggagccctcgtgttcagctataacctgggcagtggtgtggcatccatcatggtgaatggctccttcaacgatggtcggtggcaccgagttaaggccgttagggatggccagtcaggaaagataaccgtggatgactatggagccagaacaggcaaatccccaggcatgatgcggcagcttaacatcaatggagctctgtatgtgggtggaatgaaggaaattgctctgcacactaacag

SEQ ID NO: 8630 - DNA, 2629 bp, Homo sapiens
acacactctgctacattgaaactgctccctgaatcttttcctccggtaaattgtgcttcctgggaaactaagggtttcagacccaaagtttacgcctatcagacctacacagaaaatcgcatctttggagaggaatagtcagcatcaccttgattgaagggagagacctcaaggccatggattccaacgggttgagcgatccctacgtgaagttccggcttgggcatcagaagtacaagagcaagattatgccaaaaacgttgaatcctcagtggagggaacaatttgattttcacctttatgaagaaagaggaggagtcattgatatcactgcatgggacaaagatgctgggaaaagggatgatttcattggcaggtgccaggtcgacctgtcagccctcagtagggaacagacgcacaagctggagttgcagctggaagagggtgagggacacctggtgctgctggtcactctgacagcatcagccacagtcagcatctctgacctgtctgtcaactccctggaggaccagaaggaacgagaggagatattaaagagatatagcccattgaggatatttcacaacctgaaagatgtgggatttctccaggtgaaagtcatcagagcggaagggttaatggctgccgacgtcactggaaaaagtgacccattttgtgtggtagaactgaacaacgatagactgctaacacatactgtctacaaaaatctcaatcctgagtggaataaagtcttcacgttcaacattaaagatatccattcagttcttgaagtgacagtttatgatgaagatcgggatcgaagtgctgactttctgggcaaagttgctataccattgctgtctattcaaaatggtgaacagaaagcctacgtcttgaaaaacaagcagctgacagggccaacaaagggggtcatctatcttgaaatagatgtgatttttaatgctgtgaaagccagcttacgaacattaatacccaaagaacagaagtacattgaagaggaaaacagactctctaaacagctgctactaagaaactttatcagaatgaaacgttgtgtcatggtgctggtaaatgctgcatactacgttaatagttgctttgattgggattcacccccaaggagtctcgctgcttttgtgctctttctctttgttgtctggaactttgagctctacatgataccactggttttgttgttactattgacatggaactacttcttgataatatcagggaaagataacaggcaacgtgatacagtagtggaggacatgctagaggacgaggaagaagaagatgacaaagatgacaaggacagtgaaaaaaagggatttataaataaaatctatgccatccaggaggtatgtgtcagtgtccagaacatcctagatgaagtggcttcctttggcgaaaggataaagaatactttcaactggactgtcccattcttaagctggctggccattgtagccctctgtgtgttcacagccatcctgtactgcattccgctgagatacattgtccttgtctggggcatcaataaatttacaaaaaagcttcggagtccatatgcaattgataacaatgaactacttgacttcctttccagagtcccttcagatgtacaagtggtgcaataccaagaactgaaaccagatccttctcatagcccatataaaagaaagaaaaacaatcttggctagccagctcccagcactgaggagaccagcatctgtttgggaagataaaagaaaaagccctcagcctcagcagcatttcctttctttctgctttttatttattttgcctttttatcatgatcgagagaatctgtaaatagtgtacaaaggcatatgtctttgaatatatacttctattgtacagactcaacttgataaaggttttgctactgctgtgtcaaaaccttgttagctgtggataataatataacacactgaaagaacaaatataagaatgataacactggaagatatattcttatctaattactagtggattaaatactcacctgtgctctgattaaatctacatcaattgtaaatgtcgatttgattttaaagtttttttttaatgcgactattttttatctgaaaagtaatccattacacttttctatgttttatacatttcaaaagggagggaaattccaaagcctgaataatggaatggatacatttcaatttaacatatattctggctttagatcccgacattcactcctgtgcaaattacttaggtatgacttaggctaattttaagctaataagtgaaggtacattcactccctcaagagaatcaatactcagaaggttacaaagttttctttatagaatttcaatcaatcattccatctaaaaccttaaaatctctacaggactacataacataaatactgccagtttataaacgattgcctatctgaatttttatacctaccactactttaatttatacagttagttagcaaattagcaacccagtaagtacagttatcaaaaatactaggaaactatatccatatcgcttttggtgtcagattgtatctgtgcatctaaaaatattttaataaatactcaagtgctctcag

SEQ ID NO: 8631 - DNA, 852 bp, Homo sapiens
aggtgagcgaagctgcggccttggtgggggcagcggggccggggggcgctccgcggggcaggtcgcttccaagttttgcgaactgttgagttagtttcaggttgcggctccgctcccagggctttgtcaaattgagttgcagaggccggttccacccctttggcaaaggagttcctccgctagttcgctcccgggacgccgggcattttaggagcctctgcacgactcgcctgcttttgcaaatccgtctcttctcgcctcattttttccagcgctcaggaaaggccgttgcgcctcgcgaaggaaacagagccgttgaccatggttgcaactggcagtttgagcagcaagaacccggccagcatttcagaattgctggactgtggctatcacccagagagcctgctaagtgattttgactactgggattatgttgttcctgaacccaacctcaacgaggtaatatttgaggaatcaacttgccagaatttggttaaaatgctggagaactgtctgtccaaatcaaagcaaactaaacttggttgctcaaaggtccttgtccctgagaaactgacccagagaattgctcaagatgtcctgcggctttcctcaacggagccctgcggcttgcgaggttgtgttatgcacgtgaacttggaaattgaaaatgtatgtaaaaagctggataggattgtgtgtgattctagcgtcgtacctacttttgagcttacacttgtgtttaagcaggagaactgctcatggactagcttcagggactttttctttagtagaggtcgcttctcctctggtttcaggagaactctgatcctcagctcaggatttcgacttgtt

SEQ ID NO: 8632 - DNA, 2241 bp, Homo sapiens
acaccgtggaaggttcttctgggactgctgggtgctgctgcgcttgtcaccatcatcaccgtgcccgtggttctgctgaacaaaggcacagatgatgctacagctgacagtcgcaaaacttacactctaactgattacttaaaaaatacttatagactgaagttatactccttaagatggatttcagatcatgaatatctctacaaacaagaaaataatatcttggtattcaatgctgaatatggaaacagctcagttttcttggagaacagtacatttgatgagtttggacattctatcaatgattattcaatatctcctgatgggcagtttattctcttagaatacaactacgtgaagcaatggaggcattcctacacagcttcatatgacatttatgatttaaataaaaggcagctgattacagaagagaggattccaaacaacacacagtgggtcacatggtcaccagtgggtcataaattggcatatgtttggaacaatgacatttatgttaaaattgaaccaaatttaccaagttacagaatcacatggacggggaaagaagatataatatataatggaataactgactgggtttatgaagaggaagtcttcagtgcctactctgctctgtggtggtctccaaacggcacttttttagcatatgcccaatttaacgacacagaagtcccacttattgaatactccttctactctgatgagtcactgcagtacccaaagactgtacgggttccatatccaaaggcaggagctgtgaatccaactgtaaagttctttgttgtaaatacagactctctcagctcagtcaccaatgcaacttccatacaaatcactgctcctgcttctatgttgataggggatcactacttgtgtgatgtgacatgggcaacacaagaaagaatttctttgcagtggctcaggaggattcagaactattcggtcatggatatttgtgactatgatgaatccagtggaagatggaactgcttagtggcacggcaacacattgaaatgagtactactggctgggttggaagatttaggccttcagaacctcattttacccttgatggtaatagcttctacaagatcatcagcaatgaagaaggttacagacacatttgctatttccaaatagataaaaaagactgcacatttattacaaaaggcacctgggaagtcatcgggatagaagctctaaccagtgattatctatactacattagtaatgaatataaaggaatgccaggaggaaggaatctttataaaatccaacttagtgactatacaaaagtgacatgcctcagttgtgagctgaatccggaaaggtgtcagtactattctgtgtcattcagtaaagaggcgaagtattatcagctgagatgttccggtcctggtctgcccctctatactctacacagcagcgtgaatgataaagggctgagagtcctggaagacaattcagctttggataaaatgctgcagaatgtccagatgccctccaaaaaactggacttcattattttgaatgaaacaaaattttggtatcagatgatcttgcctcctcattttgataaatccaagaaatatcctctactattagatgtgtatgcaggcccatgtagtcaaaaagcagacactgtcttcagactgaactgggccacttaccttgcaagcacagaaaacattatagtagctagctttgatggcagaggaagtggttaccaaggagataagatcatgcatgcaatcaacagaagactgggaacatttgaagttgaagatcaaattgaagcagccagacaattttcaaaaatgggatttgtggacaacaaacgaattgcaatttggggctggtcatatggagggtacgtaacctcaatggtcctgggatcgggaagtggcgtgttcaagtgtggaatagccgtggcgcctgtatcccggtgggagtactatgactcagtgtacacagaacgttacatgggtctcccaactccagaagacaaccttgaccattacagaaattcaacagtcatgagcagagctgaaaattttaaacaagttgagtacctccttattcatggaacagcagatggtgagtttcagttaattagactttttagtatcacagacaggtttgcaatttcactactgacaaaacaaaagcatgaggggcaagactgttacatttacttcaataaaacagtgttgctttcc

SEQ ID NO: 8633 - DNA, 936 bp, Homo sapiens
ccggagaagaggagtgagaaggccggggaggcaggccctgctgtcttcctgcaggccggcagcctgctggcagtggaggaccaggccgtccaggaaaggaaggggtcaggaggtcgggcagggcctcagcagctgttagccgagcaaccagatcaagtcaaatttacgttctgaagtatgtccaaggaaattaagagctggtgcatgaaaagataggaaaacaatccaaatcctagcagttatcaaaagcaagtttataatacagcttgctgatgaccgtatggcactggtgtcaggcatcagcttagatccagaagcagcgattggtgtgacaaaacggccacctcctaagtgggtggatggagtggatgaaattcagtatgatgttggccggattaagcagaagatgaaagaattggccagccttcatgacaagcatttaaacagacccaccctggatgacagcagcgaagaggaacatgccattgagataactacccaagagatcactcaggcatgaagaatcgagaggaaagatcccagcattttttcgacacatcagtaccactaatggatgatggagacgataacactctttaccatcggggttttacagaggaccagttagttctggtggagcagaacacactgatggtggaagagcgggaacgagagattcgccagattgtacagtccatttctgacctgaatgaaatattcagggacttaggggcgatgattgtagaacagggtacagtccttgacagaattgactataacgttgaacagtcctgtatcaaaactgaagatggtttgaaacagcttcacaaggcagaacagtatcaaaagaagaatcggaagatgcttgtgattttaatattatttgtcatcatcattgtgctcattgttgtcctcgttggcgtgaagtctcgataa

SEQ ID NO: 8634 - DNA, 1153 bp, Homo sapiens; identical to SEQ ID NO: 6923

SEQ ID NO: 8635 - DNA, 1560 bp, Homo sapiens
gtcggctcagcaaatatccagcccaaaatacaccactagtggtctgttcttaaagaccaaaaaaccaggccctttttcttcctcctttcttgctgctacgcctcaactatttcattgcttgtcaatgctcagcaaggaagacagcctaacagcagccctcccacctgtggttgcttgctccccctgttatgtacaaccacaagtcagccacagaattctgcaaacaacccactgtgcaaggctttggagctacctcagagtgagacccagagacaaagcagccatttaccttgccttcttttagctactcgcaatgaaacgttttcacagaaagacacctggaggtggaagacttgtcaccggtacttcagatgaagcaggtttcacatgcttacccaggaatgctccttgaaaagataatctcctcagacataagcctggccacagaaaagtctctctaagaattttactcatccatctggagttggcgaaaggtgtgataccccagcaaaccttttagctaaaggatgtcaattaaacttcatcgaaaaccctgtctcccaagtagaaatacttaaaaataagcctctcagtgtaggcagacagaaaaatagttctgacattgttcagattgcgcctcaaagcttgatccttaagttgagaccaggtggtgcgcagactctgcaggtgcatgtccgccagactgaggactacccggtggatttgtattacctcatggacctctccgcctccatggatgacgacctcaacacaataaaggagctgggctcccggctttccaaagagatgtctaaattaaccagcaactttagactgggcttcggatcttttgtggaaaaacctgtatccccttttgtgaaaacaacaccagaagaaattgccaacccttgcaggctaagaaagtaacaacaaaatatgaacatttgttagaaaatgaactcttgcctgtaatcccagcacttttggaggccgaggcgagcagattgcttgagctcaggagttcgtgaccagcttgggcaacatgtagtattccatacttctgtttacctacatttggattcaagcacattttgccattgacaaatgatgctgaaagattcaatgaaattgtgaagaatcagaaaatttctgctaatattgacacacccgaaggtggatttgatgcaattatgcaagctgctgtgtgtaaggaaaaaattggctggcggaatgactccctccacctcctggtctttgtgagtgatgctgattctcattttggaatggacagcaaactagcaggcatcgtcattcctaatgacgggctctgtcacttggacagcaagaatgaatactccatgtcaactgtcttggaatatccaacaattggacaactcattgataaactggtacaaaacaacgtgttattgatcttcgctgtaacccaagaacaagttcatttatatgagaattacgcaaaacttattcctggagctacagtaggtctacttcagaaggactccggaaacattctccagctgatcatctcagcttatgaag

SEQ ID NO: 8636 - DNA, 556 bp, Homo sapiens
aatgaatacaaagccgcggtctgggtgccgcctcggccgcggccgctctcccgcgctcctttgccagaagaaaagattgatctctgggctggtgaacataatctctgtcccagtcagaaaaggagagaggaaattagcagagcgattggtggagaatgatatctgtcaaaagaaacacttggagagcactgagtttagtaataggtgactgccggaaaaaagggaactttgaatattgtcaagaacaggaggcatgagcccggaacgcgcttgcttttaggagacagccactttctgtgtggtacgctggattcaaggatgcctgatcgtactgagaagcactccacaatgccagactcacctgtggatgtgaagacgcaatctaggctgactcctccaacaatgccacctcccccaactactcaaggagctccaagaaccagttcatttacaccgacaacgttaactaatggcacgagccattctcctacagccttgaatggcgccccctcaccacccaatggcttcagcaatgggccttcctcttcttcctcct

SEQ ID NO: 8637 - DNA, 381 bp, Homo sapiens
cacccaaggccatacttcaagagtgtgctgtggtggggtggtgtcctgctgatggccgtgggagagacggggaactttgcagcctatggatttgctcccattactctgatcgctccgttaggctgtgtgtctgttacaggtagtgccattatttctgttacatttctgaaagacaatttgagagcctcagacttactcggtacgacactggcatttgcaggaacatatttactggtgaactttgctccaaatataactcaggcaatctcagcaagaacagtacagtattaccttgtcggatggcagttcctgatctatgtgatttacattaaatggaagcctcacagagacaaggctcaggagcttttcctctgatctggt

SEQ ID NO: 8638 - DNA, 800 bp, Homo sapiens
aatgagaatggagaaggtccaggacacgtgggtgggggaagctgagcgctgagaccaagggctaaagctgggagactgaaaaaatgcagaccgccggggcattattcatttctccagctctggtaaggtgccgcgccgcagtgctctgtagtaccaggtgtatggtgtggacgccatcagtgtttaatgaatgaacccaggggagcttggcgtcctgatgatgtaggctctttgaggtggctgtaggatgtgatgaaggtaacccctgtttatctgggcctgtgaaccaagctatcttggctttggaatgtggtcagagagtctggatttgatttttatccccagtctgtcctggccatagagacagcccactaaaacagtggttttcaacagtggctgcacgttagaatcatccagggaactttttaaaatcctgatgcctaggctgcaccttagaccatttgcatcagactttgggaatgggggtggaacccaggcatctgtatcttttaagacttctccagatgattccaccgtgcagccaagtttgagaaccactgcactaaaaattatttcaaaaaagccatgttacagatggctctccttggatggctattccagtcggtttccggggctgactggcccactccatttagggtgtgtagctgtgagtgtattttagcagaataaaatttcccccatctgattacttggtgatctgggtataaacctttcctgtacctgctttggtattagtgtgggttcttgttccattctgagaagctgattaaagctgtgcc

SEQ ID NO: 8639 - DNA, 786 bp, Homo sapiens
aattctggacgacacgggtcatggagcaaataaactacacttaggctactgagtttcacaaagctatctggttttatgttactgtgttattcagattcatcttaaattgaaattatcacaaaatattcatttgcattttcattactgggtatagtctacttattttttcatcaaagcatttaaatgttatatttgtctgtttcaggactcatgcccgttgcacagcagccggtttattgtgcttcaaagcatggcatagttggattcacacgctcagcagcgttggctgctaatcttatgaacagtggtgtgagactgaatgccatttgtccaggctttgttaacacagccatccttgaatcaattgaaaaagaagaaaacatgggacaatatatagaatataaggatcatatcaaggatatgattaaatactatggaattttggacccaccattgattgccaatggattgataacactcattgaagatgatgctttaaatggtgctattatgaagatcacaacttctaagggaattcattttcaagactatgatacaactccatttcaagcaaaaacccaatgaacagcttatgtgttagccatagctgaaaataagcacaaatagcttatattcagatcctatcttcatttgaatatagcttttaaatgaaatgttacagtttgaagttttccttcatgcacttggtgataaacgttttctaaatttttagttaagtatatggataaaaagttatgaactattaaaaatgtgatgtggaccaaa

SEQ ID NO: 8640 - DNA, 518 bp, Homo sapiens
tccatgagccccattctatttacagagcaaagggaaggagaaatgtcacccactccatatggcccacctccgccctaagcccttgagctatgctccaacccacagggtcagccccagcctccacctctcacatactgcttttctttgctactcataggtctggatgtaaagaacagccaaccttctctggaactcatctttgtcaatgaagacaggtccaacgcagacctcaccactctgatgcacaacgagaacctgaatggtgtgccctcgatcaccaaccccatcaaaactgcaaaccaacaccagggcaagaagcaacacccatcccaggaaaagccacaagtcctgacccccagccccaggaagcagaagctgaacagaaagtacaggtcccaccatgaccagatgatctgcaagtgcctctccctgagcatatcctactccgctaccattggcggcctgaccaccatcatcggcacctccaccagcctcatcttcctggaacacttcaacaa

SEQ ID NO: 8641 - DNA, 532 bp, Homo sapiens
tttgcgagtctctaatgaagaagtaaatgcagacccggtgttgacggcccacgcgctcctgatgaggcgcttccagagttcagcgaagtggagcatggaggccgttctctttgtgaacgccgaggccgccgccccgcgccagtccggccgccctagggatttaaatggaaataacatcacaagaattacgaagacagattttgctggtcttagacatctaagagttcttcagcttatggagaataagattagcaccattgaaagaggagcattccaggatcttaaagaactagagagactgcgtttaaacagaaatcaccttcagctgtttcctgagttgctgtttcttgggactgcgaagctatacaggcttgatctcagtgaaaaccaaattcaggcaatcccaaggaaagctttccgtggggcagttgacataaaaaatttgcaactggattacaaccagatcagctgtattgaagatggggcattcagggctctccgggacctggaagtgctcactctcaacaataac

SEQ ID NO: 8642 - DNA, 528 bp, Homo sapiens
ggagtgagaaggccggggaggcaggccctgctgtcttcctgcaggccggcagcctgctggcagtggaggaccaggccgtccaggaaaggaagggctgttagccgagcaagagctggacgagcttgctgatgaccgtatggcactggtgtcaggcatcagcttagatccagaagcagcgattggtgtgacaaaacggccacctcctaagtgggtggatggagtggatgaaattcagtatgatgttggccggattaagcagaagatgaaagaattggccagccttcatgacaagcatttaaacagacccaccctggatgacagcagcgaagaggaacatgccattgagataactacccaagagatcactcaggcatgaagaatcgagaggaaagatcccagcattttttcgacacatcagtaccactaatggatgatggagacgataacactctttaccatcggggttttacagaggaccagttagttctggtggagcagaacacactgatggtggaagagcgggaacga

SEQ ID NO: 8643 - DNA, 3837 bp, Homo sapiens
gaggcaggggtgagaccggcggccacccgtgagccctccgcacccgcaccatgcagaagagcgtgcgctacaacgaggggcacgccctgtacctggcctttctggcgcgcaaggagggcaccaagcgcggcttcctgagtaagaagacggccgaggcgagccgctggcacgagaagtggttcgccctctaccagaatgtgctcttctacttcgagggcgagcagagctgccgcccggcgggcatgtacctcctggagggctgcagctgcgaacgaacgcccgcgccacccagggccggcgccgggcagggaggcgtccgagacgcgctggacaagcagtattactttactgttctttttggccatgaaggtcagaagccactggagctgcgctgtgaggaggagcaggatggtaaagagtggatggaggccattcaccaagccagttatgcagacattttgattgagagggaagtattaatgcagaagtacattcatctagttcagatcgtagagacagaaaaaattgcagctaaccaactccgacatcaacttgaagatcaagacacagaaatcgaaaggcttaaatcagagattattgctcttaataaaaccaaagaacgaatgcgaccttaccaaagcaaccaagaagacgaagatccagacatcaagaagattaaaaaggttcagagcttcatgcgaggatggttgtgcagaaggaaatggaagaccatcgtgcaggattacatttgttctcctcatgctgaaagtatgaggaagagaaaccagattgtgttcaccatggtggaggcagagtcagagtacgttcaccagctctacatcctggtcaatggctttctccggcccctgcgtatggccgccagctccaagaagccccccatcagccacgacgacgtcagcagtatttttcttaacagtgaaacaatcatgtttcttcatgaaatatttcatcaaggactaaaggcaaggatagcaaactggcccactttaattttagctgatctgtttgatattttgctccccatgctgaacatttatcaagaatttgtgcgtaatcaccagtacagcctgcaagttctcgccaattgtaagcaaaacagagattttgacaaactcttaaaacagtatgaagccaatccagcctgtgaggggaggatgctggagacattcttgacctatcccatgtttcagatccccagatatatcatcacactccatgagctccttgctcacacaccccatgagcatgtggaaaggaaaagcctggagtttgccaaatcaaagctagaggaactatccagagtaatgcacgatgaagtcagcgacactgaaaacataaggaaaaaccttgccatcgaaagaatgatcgtggagggctgtgacatcttgctggacaccagccaaacgttcatccgccaaggttctcttattcaagtaccttccgttgagagggggaaacttagtaaagttcgcctgggttcgttgtctttgaaaaaggaaggagagagacaatgcttcttatttacaaaacactttttaatatgtacaagaagttcaggagggaagcttcatctgctcaagacaggtggggttctgtctctaatagactgcacattgattgaggagccagatgcaagcgatgatgactctaaaggttctgggcaagtgtttgggcacctggattttaaaatagtggtggagcctcctgacgctgccgccttcactgttgtcttgttagcaccctcacgccaggagaaagctgcctggatgagtgacatcagtcagtgtgtggacaatatacgatgtaatggtttaatgactatagtgtttgaagagaattccaaagtcactgtgccacatatgattaagtctgatgcccgtcttcataaagacgacactgacatttgcttcagtaaaacactcaactcctgcaaagtgccccagatccgttatgccagcgtggagcgcctcttggaacgactgacagacttgcggtttcttagtattgatttcctcaacacctttctgcacacctatcgtattttcactactgccgctgtggtgctggggaaactctccgacatatacaagaggcctttcacctccatccctgtcaggtcattggaattgttttttgctaccagccagaacaacagaggtgaacatttggtggatggcaaatccccacgtctgtgtcgcaaattctcttccccgccaccactggctgtgtccagaacatcttccccagtgagggccagaaagctgtctttgacttctcccttgaactcaaagataggagcattggacctgacaacttccagcagtcccaccaccaccacccagagtcccgctgcgtctccaccaccacacactggtcagataccactggatctcagcagaggcctctcttctccagagcaaagcccgggaacggtagaagagaatgtcgataacccacgcgtggatctgtgtaacaagctaaaacgaagtattcaaaaagcagtcctagagtctgcaccagcggaccgagcaggagtggaaagctcccctgcagcggacaccacagaactttcaccttgcagatccccctcaactcctcggcacctccgctatcgacagcctggaggacagacggcggacaatgcccactgctctgtttcaccggcttctgcttttgcaatagccacagctgcagcaggacatgggagtccaccaggctttaacaacaccgagagaacatgtgataaagagtttattatacggagaacggctaccaatcgagttctgaacgtcctccgtcactgggtctcaaagcacgcacaggatttcgaactcaacaatgaactaaagatgaatgtcctaaatttgctagaagaagttttgcgagacccagaccttcttccccaagaaaggaaagccgccgcgaatatcctcagggccctttcacaagatgaccaagatgacatccacctaaaattagaggatataattcaaatgactgactgcatgaaggccgaatgctttgagtccttgtcggccatggagctggcagaacagatcaccctcctggaccatgtcattttcagaagcattccctacgaggagtttcttgggcaggggtggatgaagctggataaaaacgaaagaactccttacattatgaaaaccagccaacacttcaatgacatgagtaacctggtggcctcccagataatgaactatgctgatgtcagctcccgtgccaacgccatcgagaaatgggtggcagtggcggacatctgccgatgcctgcacaactacaacggcgtgctggagatcacctcggccttaaacagaagtgccatctacaggctgaagaaaacctgggccaaggtctctaagcagacaaaagctctaatggacaaacttcaaaagactgtttcctctgaaggaagatttaaaaatcttagagaaacccttaaaaattcatcaaggctgaatacttgatttaaagagttgtaaccctcctgcagttccttatcttgggatgtacttgacagacctggcatttattgaagaaggaacaccaaactttactgaggaaggccttgtcaatttctccaaaatgagaatgatatcacacatcatcagagagatacgccagttccagcagacttcctacagaatagatcatcagccaaaggtcgcacagtacttgcttgacaaagaccttatcatagatgaagatacgctatatgagctgtcactaaaaattgaacctcgactccctgcttgaagatctggccttgcccctgagtccacgggatgttcatggaaa

SEQ ID NO: 8644 - DNA, 653 bp, Homo sapiens
cgcccaggccccaccatgaccggctccgcggccgacactcaccgctgcccccaccccaaaggcgccaaaggcacccggtcccggagcagccacgcgcggcccgtgagcctcgccaccagcgggggctcagaggaggaggacaaagacggcggggtgctgttccacgtcaacaagagcggcttccccatcgacagccacacctgggagcgcatgtggatgcacgtggccaaggtgcaccctaaggggggagaaatggtgggcgccatcaggaacgccgccttcttggcaaagcttatttgtgctccaagaaaaaagaaagacttttggctgagacttaaaagggactttccagtacacatgatgaattagtctcactggatagaaaaagaggatgaggagtgaaactctctttttgccttggagagaagccagtgagccatttgggtttggtggctaaggatatctttaccgagggagggagatgtaccctggtgggagtagatacgttatatgaaacatcaaaatgcaaactggggagaaatgctgccgagcctcggggttatagcgtggcggatggtttcccctggaccctggggacgctggtacggctgagaagattcctgggcaggtctaggaatgccagacttgagacc

SEQ ID NO: 8645 - DNA, 626 bp, Homo sapiens
agaaaaattaccaaaaactggatcatcacagatgtgtcaaacagccttccttcagacttcagactaacttcaacatataacaggtttcaagattacttaccaggcccatcgatggtatacatgacaaggggattgtagaagacatccattgtggatccatgaagggcactggtatgcgaccacctcacccaggcatgggccctccccagagtccaatggatcaacacagccaaggttatatgtcaccacacccatctccattaggagccccagagcacgtctccagccctatgtctggaggaggcccaactccacctcagatgccaccaagccagccgggggccctcatcccaggtgatccgcaggccatgagccagcccaacagaggtccctcacctttcagtcctgtccagctgcatcagcttcgagctcagattttagcttataaaatgctggcccgaggccagcccctccccgaaacgctgcagcttgcagtccaggggaaaaggacgttgcctggcttgcagcaacaacagcagcagcaacagcagcagcagcagcagcagcagcagcagcagcagcagcaacagcagccgcagcagcagccgccgcaaccacagacgcag

SEQ ID NO: 8646 - DNA, 1509 bp, Homo sapiens
gtagactactgggtgaaggcttttcttgaccgcccgagccagccaactcaagagacaaagaaaaactttgaagtagtggatctggtggatgtcaatacccctgatttaatggcacctgtgtctgctaaaaaagaaaagaaagtttcctgcatgttcattcctgatgggcgggtgtctgtctctgctcgaattgacagaaaaggattctgtgaaggtaaaatcctagtgcttatggcagttaaaacaggaactgggtttaggggcaagggcatgggactggggtagaggaagtgtcattaactatactgagtatcagtaagttttcatctttctcattgctaggtgatgagatttccatccatgctgactttgagaatacatgttcccgaattgtggtccccaaagctgccattgtggcccgccacacttaccttgccaatggccagaccaaggtgctgactcagaagttgtcatcagtcagaggcaatcatattatctcagggacatgcgcatcatggcgtggcaagagccttcgggttcagaagatcaggccttctatcctgggctgcaacatccttcgagttgaatattccttactggtgggtagatgcagggtggcttcagcagagaaattgttcatctgttaccacagctgtcttgtttctccagacctctggtgtaataaactgccatcttcctttctagatctatgttagcgttcctggatccaagaaggtcatccttgacctgcccctggtaattggcagcagatcaggtctaagcagcagaacatccagcatggccagccgaaccagctctgagatgagttgggtagatctgaacatccctgataccccagaagctcctccctgctatatggatgtcattcctgaagatcaccgattggagagcccaaccactcctctgctagatgacatggatggctctcaagacagccctatctttatgtatgcccctgagttcaagttcatgccaccaccgacttatactgaggtgaggattgtcatctttactgttaaatttgtcctaagctttctataagaagttgacttagacggattgctaaactggtttgttctttttgttcttacctgaactgaaatagtctgtttctttctttaggtggatccctgcatcctcaacaacaatgtgcagtgagcatgtggaagaaaagaagcagctttacctacttgtttctttttgtctctcttcctggacactcactttttcagagactcaacagtctctgcaatggagtgtgggtccaccttagcctctgacttcctaatgtaggaggtggtcagcaggcaatctcctgggccttaaaggatgcggactcatcctcagccagcgcccatgttgtgatacaggggtgtttgttggatgggtttaaaaataactagaaaaactcaggcccatccattttctcagatctccttgaaaattgaggccttttcgatagtttcgggtcaggtaaaaatggcctcc

SEQ ID NO: 8647 - DNA, 581 bp, Homo sapiens
caccatgaatccactcctgatccttacctttgtggcagctgctcttgctgccccctttgatgatgatgacaagatcgttgggggctacaactgtgaggagaattctgtcccctaccaggtgtccctgaattctggctaccacttctgtggtggctccctcatcaacgaacagtgggtggtatcagcaggccactgctacaagtcgtaagtgtggggcccccgactgcaaagctcccggccagtctgcctgggagagcttggcttcagcccagggaactactgaggttgggtaagatggatgggagaggtggtggagaagaaaacttgttggcagctgcggactctccagagcagagagtgaacacaagacaggaacctctcacacccaggcaaatccatgaaacagcaagggttgtggtcataaaagcaggcagggatgatcttggggtggtgagagctagtgagaaaagcaggcaagtatcttttgctggttagctacacattaaagccaactaagaaagactttttaaaaatacagatgcctttgtcctatcccagggcaattaagtcaaaattttcag

SEQ ID NO: 8648 - DNA, 781 bp, Homo sapiens
ctttgttttcctaaatgtatgtcaaaagatctgctagtttttagactgctggaactgcccaataatttggatgagagtcatgcttcttctatagaattctacaaaaaagtaatcagatagtgggcatggtggctggaaggctcctgtaattccagctgctaggggaaattgatgcagaggataacttgagcccaggggttcgagaccagcctcggaaagaaaaaaaaaattaaaagaaaagtaatccgtatccaatgacttcggctaactgagaggtgttttcttgtctggtttggcctgactggcacacagaggaggccgtcaatgaggtgaagcgccaggcgatgacggagctgcagaaggccgtgtctgaggcggagcggaaagcccacgacatgatcacaacagagagggccaagatggagcgcacggtcgccgaggccaaacggcaggcggcggaggacgcactggcagttatcaatcagcaggaggattcaagcgagagttgctggaattgtggccgtaaagcgagtgaaacctgcagtggctgtaacacagcccgatactgtggctcattttgccagcacaaagactgggagaagcaccatcacatctgtggacagaccctgcaggcccagcagcagggagacacacctgcagtcagctcctctgtcacgcccaacagcggggctgggagcccgatggacacaccaccagcagccactccgaggtcaaccaccccgggaaccccttccaccatagagacaacccctcgctagac

SEQ ID NO: 8649 - DNA, 2925 bp, Homo sapiens
gttactgctatctttaggttttctttttgcaggtgctccaaacatgcttcctttatttttatttttatttttttggaaacggagtctcgctttgttgcccaggctggagtccagtggtgcgatctcggcttactgcatgcttcgtttattaatttagtttttcttaatgtagtttttattatttccctattttattttactggttgatatggggatactactttctgttctactctccatttttttctctctgggtcgcactgtagttccttctttctttctctctccttccctcctcccctccttcctccctctagcctcaccccattttttaatctctctctgtgttcatatccctcttctctttccctctcaatctttgatctctcacccttcctcctttcagctcccgcacttgctctgtttgccacaactagcattttctatttcagctgcaagttttctcattcgctcctttctttcaaggaaagatggaaagttcagttctcttaactttggcagaaccacagccccactgggggtccgaggtgaaatggttccctaattatgtacctttattgggaccctacaacacttagtgctgcctgtatcaacaacccagaaactactcagtggactatttcatcaacatttgttagagctcattttcttttgttttctaaaatcctcctgtgggggccagtttaactttctttctgtaagattctgagtcattgctactaaatacaaccatggaaagattaccaaaaatagaagcccttttgtgcgtctgtgaagggaagggattggatcagttcatcattaagggctccttctgtttactaattataccttgattgtgccacaaaaagaacatatgataaccacctgcctcaaagataatctgctcaaaagacttccatttcattctccaccccaagaagctttagaaattttcttccttctcccagaatgtcctatgatgcatatttccaacaactgggagagccttgtggttccatttgcaaaggttgtttgtaaaatgagtgaccagtcttcactggttctggaagagtattgggcaactctgcaagaatccactttcagcaaactggtccagatgtttaaaacagccgtcatatgccagttggattactgggatgaaagtgctgaggagaatggtaatgttcaagctctcctagaaatgttgaagaagctgcacagggtaaaccaggtgaaatgtcaactacctgaaagtattttccaagtagacgaactcttgcaccgtctcaatttttttgtagaagtatgcagaaggtacttgtggaaaatgactgtggacgcttcagaaaatgtacaatgctgcgtcatattcagtcactttccatttatctttaataatctgtcgaaaattaaactactacatacagacacacttttaaaaatagagagtaaaaaacataaagcttatcttaggtcggcagcaattgaggaagaaagagagtctgaattcgctttgaggcccacgtttgatctaacagtcagaaggaatcacttgattgaggatgttttgaatcagctaagtcaatttgagaatgaagacctgaggaaagagttatgggtttcatttagtggagaaattgggtatgacctcggaggagtcaagaaagagttcttctactgtctgtttgcagagatgatccagccggaatatgggatgttcatgtatcctgaaggggcttcctgcatgtggtttcctgtcaagcctaaatttgagaagaaaagatacttcttttttggggttctatgtggactttccctgttcaattgcaatgttgccaaccttcctttcccactggcactgtttaagaaacttttggaccaaatgccatcattggaagacttgaaagaactcagtcctgatttgggaaagaatttgcaaacacttctggatgatgaaggtgataactttgaggaagtattttacatccattttaatgtgcactgggacagaaacgacacaaacttaattcctaatggaagtagcataactgtcaaccagactaacaagagagactatgtttctaagtatatcaattacattttcaacgactctgtaaaggcggtttatgaagaatttcggagaggattttataaaatgtgcgacgaagacattatcaaattattccaccccgaagaactgaaggatgtgattgttggaaatacagattatgattggaaaacatttgaaaaggtacatcatcaagtctaagttgattaaattcagttttccttcctatttcctcaataacttttttttgtattttctctagaatgcacgttatgaaccaggatataacagttcacatcccaccatagtgatgttttggaaggctttccacaaattgactctggaagaaaagaaaaaattccttgtatttcttacaggaactgacagactacaaatgaaagatttaaataatatgaaaataacattttgctgtcctgaaagttggaatgaaagagaccctataagagcactgacatgtttcagtgtcctcttcctccctaaatattctacaatggaaacagttgaagaagcgcttcaagaagccatcaacaacaacagaggatttggctgaccagcttgcttgtccaacagccttattttgttgttgttatcgttgttgttgttgttgttgttgttgtttctctactttgttttgttttaggcttttagcagcctgaagccatggtttttcatttctgtctctagtgataagcaggaaagagggatgaagaagagggtttactggccggttagaacccgtgactgtattctctcccttggatacccctatgcctacatcatattccttacctcttttgggaaatatttttcaaaaataaaataaccgaaaaatt

SEQ ID NO: 8650 - DNA, 394 bp, Homo sapiens
gttagcataggtgtactggttgcccggttcttcaagccagtttggtcaaaagctttcttgcttggtgaagcagcttggtttcaggtgcatcggatgctcatgttcaccacaactgtcctcacctgcattgcttttgttatgccgtttatatacaggggaggctggagtaggcatgcaggttaccacccatacctcggctgtatagtgatgactttggcagttcttcagcctcttctggcagtcttcaggccacctttacatgacccaagtggcagcgatgttcctgggaatggatttaccaggactgaatcttcctgattcatggaaaacctatgcaatgaccggattcgtagcctggcatgttgggactgaggttgttctggaggtacatgct

SEQ ID NO: 8651 - DNA, 760 bp, Homo sapiens
agcagcaggaggaggcagagcacagcatcgtcgggaccagactcgtctcaggccagttgcagccttctcagccaaacgccgaccaaggaaaactcactaccatgagaattgcagtgatttgcttttgcctcctaggcatcacctgtgccataccagttaaacaggctgattctggaagttctgaggaaaagcagcactaaagatgtacctacccctccacaacagatgaaactgtgccagccaaacaacaaatgggcattgtccccagaagcttggacaaaaaggcacacagagttcaattccagttgaacagaataaaggccaaaatagagctgccttgggggtcactgcaattagactgcttaatgaagacattaaaagaagtattctgtctttacaacaaatacccagatgctgtggccacatggctaaaccctgacccatctcagaagcagaatctcctagccccacagacccttccaagtaagtccaacgaaagccatgaccacatggatgatatggatgatgaagatgatgatgaccatgtggacagccaggactccattgactcgaacgactctgatgatgtagatgacactgatgattctcaccagtctgatgagtctcaccattctgatgaatctgatgaactggtcactgattttcccacggacctgccagcaaccgaagttttcactccagttgtccccacagtagacacatatgatggccgaggtgatagtgtggtttatggactgag

SEQ ID NO: 8652 - DNA, 2164 bp, Homo sapiens
aaagagggttttaggcaaaggcagctgttcttcatcatctatattgagaaatagtagtattgcttttatggacatggttacttcctacagcagaaagaaagaaagcaaacaaaaccccatatattgttttgagatgtctagaatgcagaagaactggagaatactttctgattttgttcagcattcaggatactgatggcatggaaagctgtgttatcaaagccacacacatgcgaacacagactggaaagaggcttctttaggtgcatatgtactccaggtcaaggccacagatgcagatgacccgacctatggaaacagtgccagagtcgtttacagcattcttcagggacaaccttatttctctattgatcccaagacaggtgttattagaacagctttgccaaacatggacagagaagtcaaagaacaatatcaagtactcatccaagccaaggatatgggaggacagcttggaggattagccggaacaacaatagtcaacatcactctcaccgatgtcaatgacaatccacctcgattccccaaaagcatcttccacttgaaagttcctgagtcttcccctattggttcagctattggaagaataagagctgtggatcctgattttggacaaaatgcagaaattgaatacaatattgttccaggagatgggggaaatttgtttgacatcgtcacagatgaggatacacaagagggagtcatcaaattgaaaaagcctttagattttgaaacaaagaaggcatacactttcaaagttgaggcttccaaccttcaccttgaccaccggtttcactcggcgggccctttcaaagacacagctacggtgaagatcagcgtgctggacgtagatgagccaccggttttcagcaagccgctctacaccatggaggtttatgaagacactccggtagggaccatcattggcgctgtcactgctcaagacctggatgtaggcagcagtgctgttaggtacttcatagattggaagagtgatggggacagctactttacaatagatggaaatgaaggaaccatcgccactaatgaattactagacagagaaagcactgcgcagtataatttctccataattgcgagtaaagttagtaaccctttattgaccagcaaagtcaatatactgattaatgtcttagatgtaaatgaatttcctccagaaatatctgtgccatatgagacagccgtgtgtgaaaatgccaagccaggacagataattcagatagtcagtgctgcagaccgagatctttcacctgctgggcaacaattctcctttagattatcacctgaggctgctatcaaaccaaattttacagttcgtgacttcagaaacaacacagcggggattgaaacccgaagaaatggatacagccgcaggcagcaagagttgtatttcctccctgttgtaatagaagacagcagctaccctgtccagagcagcacaaacacaatgactattcgagtctgtagatgtgactctgatggcaccatcctgtcttgtaatgtggaagcaatttttctacctgtaggacttagcactggggcgttgattgcaattctactatgcattgttatactcttagccatagttgtactgtatgtagcactgcgaaggcagaagaaaaaagacaccctgatgacctctaaagaagacatcagagacaacgtcatccattacgatgatgaaggaggtggggaggaagatacccaggctttcgacatcggggctctgagaaacccaaaagtgattgaggagaacaaaattcgcagggatataaaaccagactctctctgtttacctcgtcagagaccacccatggaagataacacagacataagggatttcattcatcaaaggctacaggaaaatgatgtggatccaactgccccaccatacgattcactggccacatatgcctacgaagggagtgggtccgtggcagagtccctcagctctatagactctctcaccacagaagccgaccaggactatgactatctgacagactggggaccccgctttaaagtcttggcagacatgtttggcgaagaagagagttataaccctgataaagtcacttaagggagtcgtggaggctaaaatacaaccgagaggggagatttt

SEQ ID NO: 8653 - DNA, 794 bp, Homo sapiens
gccagatgtggtgagggctaggaaaagagtttgttgggaaccctgggttatcggcctcgtcatcttcatatccctgattgtcctggcagtgtgcattggactcactgttcattatgtgagatataatcaaaagaagacctacaattactatagcacattgtcatttacaactgacaaactatatgctgagtttggcagagaggcttctaacaattttacagaaatgagccagagacttgaatcaatggtgaaaaatgcattttataaatctccattaagggaagaatttgtcaagtctcaggttatcaagttcagaaatcaacaagacagaaacagacagctatctaaaccattgctgcggaacacgaagaagtaaaactctaggtcagagtctcaggatcgttggtgggacagaagtagaagagggtgaatggccctggcaggctagcctgcagtgggatgggagtcatcgctgtggagcaaccttaattaatgccacatggcttgtgagtgctgctcactgttttacaacatataagaaccctgccagatggactgcttcctttggagtaacaataaaaccttcgaaaatgaaacggggtctccggagaataattgtccatgaaaaatacaaacacccatcacatgactatgatatttctcttgcagagctttctagccctgttccctacacaaatgcagtacatagagtttgtctccctgatgcatcctatgagtttcaaccaggtgatgtgatgtttgtgacaggatttggagcactgaaaaatgatggt

SEQ ID NO: 8654 - DNA, 554 bp, Homo sapiens
actttaaaagtttactcgggccgggacgcagggcaaagcgagccatggctgtctacgtcgggatgctgcgcctggggaggctgtgcgccgggagctcgggggtgctgggggcccgggccgccctctctcggagttggcaggaagccaggttgcagggtgtccgcttcctcaggccctcaggagaaaaactggcccaccaaggagtctaaaatcctaagaccttggattcaagcccagggtccaggcacgcttccctggttcctcaggaaggaccccagtgacctgtttattctccaggaggcaggggctaggggtgaaggcatggtcctgctttttccagagaggtggatcgcatggtctccacgcccatcggaggcctcagctacgttcaggggtgcaccaaaaagcatcttaacagcaagactgtgggccagtgcctggagaccacagcacagagggtcccagaacgagaggccttggtcgtcctccatgaagacgtcaggttgacctttgcccaactcaaggaggaggtggacaaagctgcttctggcctc

SEQ ID NO: 8655 - DNA, 674 bp, Homo sapiens
agtgacgagcctcttgacaaacggggattattagaagaaagaatgaatttaagtcgtctaaaacttgctatcaaatataaccagaaagagtttgtctcccagtctaactgccagcagttcctgaacactgtttggtttggacagatgtcgggttaccgacgcaagcccacctgtaagaagataatgactgttttgacagtaggcatcttttggccagttttgtcactttgttatttgatagctcccaaatctcagtttggcagaatcattcacacaccttttatgaaatttatcattcatggagcatcatatttcacatttctgctgttgcttaatctatactctcttgtctacaatgaggataagaaaaacacaatggggccagcccttgaaagaatagactatcttcttattctgtggattattggtaagtatcaagttagtttgaaaggttttgtctttatttagcccactgattctttcttgattgatggcattgtgaatattgggttcaatttgcaattttacactgttcacaccacaagaatttgaacacttccatgatcactgaagacttaactaacatgtctgtaaagataaatgttcctgaacttgatgataaggaagcatctctcttatttaatatttcttaaatacatggaattttaaaatta

SEQ ID NO: 8656 - DNA, 1256 bp, Homo sapiens
cagccgcggtccagagcgcgcgaggttcggggagctcggccaggctgctggtacctgcgtccgcccggcgggtctcactctgttgcccaggctgcagtgcagtggcatgatcatagttcacttcagtcttgaactccctggctcaagagatcctcccacctcagcctcccaagtagctgaccacaggacaggctgctttggtttgtgacctccaggcaggacggccatcctctccagaatgaagatcttcttgccagtgctgctggctgcccttctgggtgtggagcgagccagctcgctgatgtgcttctcctgcttgaaccagaagagcaatctgtactgcctgaagccgaccatctgctccgaccaggacaactactgcgtgactgtgtctgctagtgccggcattgggaatctcgtgacatttggccacagcctgagcaagacctgttccccggcctgccccatcccagaaggcgtcaatgttggtgtggcttccatgggcatcagctgctgccagagctttctgtgcaatttcagtgcggccgatggcgggctgcgggcaagcgtcaccctgctgggtgccgggctgctgctgagcctgctgccggccctgctgcggtttggcccctgaccgcccagaccctgtcccccgatcccccagctcaggaaggaaagcccagccctttctggatcccacagtgtatgggagcccctgactcctcacgtgcctgatctgtgcccttggtcccaggtcaggcccaccccctgcacctccacctgccccagcccctgcctctgccccaagtggggccagctgccctcacttctggggtggatgatgtgaccttccttgggggaccgcggaagggacgagggttccctggagtcttacggtccaacatcaggaccaagtcccatggacatgctgacagggtccccagggagaccgtgtcagtagggatgtgtgcctggctgtgtacgtgggtgtgcagtgcacgtgagagcacgtggcggcttctgggggccatgtttggggagggaggtgtgccagcagcctggagagcctcagtccctgtagccccctgccctggcacagctgcatgcacttcaagggcagcctttgggggttggggtttctgccacttccgggtctaggccctgccccaaatccagccagtcctgccccagcccacccccacattggagccctcctgctgctttggtgcctcaaataaatacagatgtcccccagc

SEQ ID NO: 8657 - DNA, 665 bp, Homo sapiens
acggtgccaccctcatcctggcctctcccatcttcaatggcaagaaggcactggaggccatcagcagagagaggtgtcattgctgggtcccctgcacctccagagttgatccgagccatcatcaacaagataaatatgaaggacctggtgaaatctcaggaagaaattgcagcatgggaagatggacagcaaagcaccgatgtcctgctagaacgtcctggcaggttgcttatggaaccacagagaacagtcccgtgacattcgcgcacttccctgaggacactgtggagcagaaggcagaaagcgtgggcagaattatgcctcacacggaggcccggatcatgaacatggaggcagggacgctggcaaagctgaacacgcccggggagctgtgcatccgagggtactgcgtcatgctgggctactggggtgagcctcagaagacagaggaagcagtggatcaggacaagtggtattggacaggagatgtcgccacaatgaatgagcagggcttctgcaagatcgtgggccgctctaaggatatgatcatccggggtggtgagaacatctaccccgcagagctcgaggacttctttcacacacacccgaaggtgcaggaagtgcaggtggtgggagtgaaggacgatcggatgggggaagagatt

SEQ ID NO: 8658 - DNA, 541 bp, Homo sapiens
ggcccaggccgcggccgcgccgcatccgctggttgtccaccttgccttgccccagggtgcaatacctgccttgcgtcgcccgtgccgctccagccaccgtcaaatccgggtagcgacccggggcgtttgcagcggtgccgaggaagaggacgggaacggtgttacgattgcctgcgtttaggaggtggctgcgttgtgggaaaagctatcaaggaagaaattgccaaaccatgtctttttttctgttttcagagtagttcacaacagatctgagtgttttaattaagcatggaatacagaaaacaacaaaaaacttaagctttaatttcatctggaattccacagaaccttcggctcgcgtgcttctgagctgctgtggatggcctcggctctctggactgtccttccgagtaggatgtcactgagatccctcaaatggagcctcctgctgctgtcactcctgagtttctttgtgatgtggtacctcagccttccccactacaatgtgatagaacgcgtgaactggatgtacttctatgag

SEQ ID NO: 8659 - DNA, 561 bp, Homo sapiens
gagatttacccgagcgtgttgcggcagcggctgggcttgcaaggcgcgatccaagagggatttaagcagcccagagctccagagaaaaagagagcgagagagaaccacacacagagacggcttaagcgtttacccgaattaaatatatatttttaaaaagaactgttgagttttatcattttcgttaagtgaccgtgcgcagcgctgtaactgacttactggattatttccagaaggagtctgcctctgtcgcccaggctggagtgcggtggcgcgatctcggccccctgcaagctccgcctcccgagttcactccattctcctgcctcagcctccggagtagctgggactacaggcggccgccactacgccaggctaattttttttgtatttttagtagagacggggtttcactgtgttagccaggatggtctcgctctcctgacctcgtgatccgcctgcctcggcctcccaaagtgctgggattacaggcgtgagccaccatgaccggcccaagtctcacttttttaacgtcactttgctataggttttttggtatga

SEQ ID NO: 8660 - DNA, 791 bp, Homo sapiens
ttctgattccagatgtaaaaataatgtgagaaattaactttatatctaaaaaaaaagttaaactacttacccaaattacttgggaaatacaatattctgatgagaagagatgccattatacaccttatgaaaatttccagtgttgacagattgtcaacatctttacaggtaccacattaaaactatactgacggtggttttgtgtttctccttgttaatttgcagggcacttgtggatctatagacctcagggtcattgatatgtatggcttatggttgaaaattctctagaggaaagcatttagttacttggcttcggttcatttgagttacaaataagctagagtagacttctgtgtattcctttcttgatgagatgcaactttcaaccgagagggaaactggcactgatttctctgtggtaacccttgttctctgtgtcttttctggatacaacagttctgtggaagcaaatcattgaacgcaatggaggagtcctcaccagtgccttgaatgtcagctgcctggcgaaggtcactgacggcttcacccaaggacatatagtcgaagtggttaaaggcgtgctcacagatcagagaatccggcggcaaattcataaacctctcactgcagttgagtttattacggcgataaccagcatgaatccagtgtacaaagaggaagaagagagctttaagaactggtatgccaaaactcctctgggtaaaaaacgtgccttggcgataacaggaggcagcacagaaaaggcaaaggacaaagggaaaaggaaa

SEQ ID NO: 8661 - DNA, 530 bp, Homo sapiens
actagaaagacaatgtcttttgcataacaatttaatccatccattcatttactggtgaatattcatattctggaggtagaaatttcaggatttacacattggtggaaataggaaatgtagatgagccccaggatagtgacaacctctggtgggacgcctttgccactgaattttttgaagatgacgccacattaaccctttcattttgtttggaagatggaccaaagcgatacactatcggcaggaccctcatcccccgttactttagcactgtgtttgaaggaggggtgaccgacctgtattacattctcaaacactcgaaagagtcataccacaactcatccatcacggtggactgcgaccagtgtaccatggtcacccagcacgggaagcccatgtttaccaaggtatgtacagaaggcagactgatcttggagttcacctttgatgatctcatgagaatcaaaacatggcactttaccattagacaataccgagagttagtcccgagaagcatcctagccatgcat

SEQ ID NO: 8662 - DNA, 628 bp, Homo sapiens
gaacggcccttgctgccaccaacatggagactttgtaccgtgtcccgttcttagtgctcgaatgtcccaacctgaagctgaagaagccgccctggttgcacatgccgtcggccatgactgtgtatgctctggtggtggtgtcttacttcctcatcaccggagccctcccatcccagggatccgagtcaaatatatttttcaaggccaaattgttgctctttttgttgcttgccatacgttgtttgataaatgtcctgggaaagcctaatttggcaaactccgtttccatggttggttgtttgataaaggtcctgggaaggtctaatttggccaactccgcttccatggttggtcaagagcttgtgggacttttaaacttatctttgtcctggaatcttggaagagacttgacaatctttagttttgttggctcaaacctagggttctgtgttgccttttgcatgacctacaataaatatcaatggaattttctgaaatcacaggtttgataaatatttgagattggagatgagatttgcagacgatactgtatttcagtgggcagaagttgagaattaaaaaaataagataaatagcattactattaaacgcttctgaattgtctatc

SEQ ID NO: 8663 - DNA, 835 bp, Homo sapiens; identical to SEQ ID NO: 6666

SEQ ID NO: 8664 - DNA, 621 bp, Homo sapiens
tagtagagatggggtttcaccatgttgtccaggctggtctcaaagtcctgacctcaagcgatccacccacctcagcctcccaaagtgctgggattacaggggtgagccaccgtgcccagccttaatttttgtatttttagtagagatgggtttcaccatgttagctaggctggtctccaactcctggcctcaagtgatccacctgccttggcctccctaagtgctgggatttcaggcatgagccatggcaactggcctgctctgttctaaatgcagatctaaaccccctgcaggtaacctggatgaggacatcattgcagaagagaacatcgtttcccgaagtgagttcccagagagctggctgtggaacgttgaggacttgaaagagccaccgaaaaatggaatctctacgaagctcatgaatatatttttgaaagactccatcaccacgtgggagattctggctgtgagcatgtcggacaagaaagggatctgtgtggcagaccccttcgaggtcacagtaatgcaggacttcttcatcgacctgcggctaccctactctgttgttcgaaacgagcaggtggaaatccgagccgttctctacaattaccggcagaacca

SEQ ID NO: 8665 - DNA, 542 bp, Homo sapiens
agaagtcgataagaccaggagaagtgaagatgtaacatgttatctgtcgctcctcttagctggcggagagaatttacatttaaagattagcagagtgagaaagagaaatctgccttttgttgtgtggggtgaggaggaggcatctacccctggccttgacgctatctcccatcacctctgctatccagacaggactcaccgagaaaagattgatctctgggctggtgaacataatctctgtcccagtcagaaaaggagagaggaaattagcagagcgattggtggagaatgatatctgtcaaaagaaacacttggagagcactgagtttagtaataggtgactgccggaaaaaagggaactttgaatattgtcaagataaaccccacttgaaaaactgaggtgcttaaggagtaaaataatatgttcctggtggcatcctccagatcgtactgagaagcactccacaatgccagactcacctgtggatgtgaagacgcaatctaggctgactcctccaacaatgccacctcccccaactact

SEQ ID NO: 8666 - DNA, 872 bp, Homo sapiens
tccgtggctgtgcagcttgggtgtcctgtgctcggcttaggggcacaggcttgcgggcggacctagggacggcggaggcatcgtgtccttcctgcaggaaggaaggagcttccggcgctttcctgggaggctcgctggggccgcggagataacctgaggtcctgcaacaggctgggggcccaaggaccatcccaggccttggaacagttggtatctttcagtcgccgccctggagaggcaggtgtttgacttcctgggctaccagtgggcgcccatcctggccaactttgtccacatcatcatcgtcatcctgggactcttcggcaccatccagtaccggctgcgctatgtcatggtgtacacgctgtgggcagccgtctgggtcacctggaacgtcttcatcatctgcttctacctggaagtcggtggcctcttaaaggacagcgagctactgaccttcagcctctcccggcatcgctcctggtggcgtgagcgctggccaggctgtctgcatgaggaggtgccagcagtgggcctcggggccccccatggccaggccctggtgtcaggtgctggctgtgccctggagcccagctatgtggaggccctacacagttgcctgcagatcctgatcgcgcttctgggctttgtctgtggctgccaggtggtcagcgtgtttacggaggaagaggacagctgtgagtatggggcctctgcaggcagtggggcgggagacggctacagaggtggcagctctgagtctgtcccgtctggggcaaggcgagagacctccccacttggaagggacctcacgcccagcagggccttgctcacggccgtaggcctgagcgaggactcgccacacaccaggg

SEQ ID NO: 8667 - DNA, 767 bp, Homo sapiens
agctctacagaagatgaaaagaaaactgtggaagaaaagagcaccttcatgcaaagggttcactagcgagttgagccctgagaaagagagacaaatcaaaaattgtgacacttagaaatataaatccaggcttataattatctagaaatgaaagtgtaacttgatgaaccttaaggagcactcttctatcatatttcctaaaataacagactcatatggaaatggaaaatggtggcatgatacaaaacagtatccggtgtttgtgggccacaagccaggacggaacaccacacagaggcacaggctggacatccagatgattatgatcatgaacggaaccctctacattgctgctagggaccatatttatactgttgatatagacacatcacacacggaagaaatttattgtagcaaaaaactgacatggaaatctagacaggccgatgtagacacatgcagaatgaagggaaaacataaggatgagtgccacaactttattaaagttcttctaaagaaaaacgatgatgcattgtttgtctgtggaactaatgccttcaacccttcctgcagaaactataagatggatacattggaaccattcggggatgaattcagcggaatggccagatgcccatatgatgccaaacatgccaacgttgcactgtttgcagatggaaaactatactcagccacagtgactgacttccttgccattgacgcagtcatttaccggagtcttggagaaagccctaccctgcggaccg

SEQ ID NO: 8668 - DNA, 537 bp, Homo sapiens
tcacagagcaagatggaaaaatataggcctcatcagtctcatgccaaccagaatgggccttcaacttatggtgctggtttgattgaatggaccactgcatgagtggaaaatctgaacttggctctgaactctgcctcagccatcgggtgccatgtggtcaacataggggctgaggacctgaaggaggggaagccttatctggtcctgggacttctgtggcaagtcatcaagattgggttgtttgctgacattgaactcagcagaaatgaagctctgattgctcttttgagagaaggtgagagcctggaggatttgatgaaactctcccctgaagagctcttgctgaggtgggctaattaccacctggaaaatgcaggctgcaacaaaattggcaacttcagtactgacatcaagctgactgacttctacagcaatataaaggactcaaaagcttattaccacctgcttgagcaggtggctccaaaaggagatgaagaaggtgttcctgctgttgttattgacatgtcaggactgcgg

SEQ ID NO: 8669 - DNA, 490 bp, Homo sapiens
agctgcggccgcgcccttgccagagccggtgcgtccgcctagccccgctccgcctgaggccgtcagggctcccgaggatggaagattcccaggagacatcgccgtcctccaacaactcctcggaggagctcagctctgctctgcacctgtccaagggcatgtcgatcttcctcgacatactgaggagagcagacaaaaatgatgatggaaaattatcctttgaagaattcaaagcatattttgcagatggtgttctcagtggagaagaattacacgagcttttccataccattgatacacataatactaataatcttgacacagaagagctatgtgaatatttttctcagcacttgggcgagtatgagaatgtactagcagcacttgaagacctgaatctttccatcctgaaggcaatgggcaaaacaaagaaattttgaagactttcagcactggggcaagagaaagcgtagccaccagcaccccgcaa

SEQ ID NO: 8670 - DNA, 1700 bp, Homo sapiens
gtgcccgctcgggctgctgcggctggggcttgcttccttatacccacctctcctcctctgggtctgcgtgtgtatgctcaaggtgtcagccgtactgtgtgtgtgtgcagccgcttggtgcagtcagtctctcgcagctgccgcggcggtggctgcagccggggggcggtcggacggcggtaattttctggatgataaacaatggctcaccacaatctctcagtatgacaaggaagtcggacagtggaacaaattccgagacgatgattatttccgcacttggagtccaggaaaacccttcgatcagggatgaaagaagcaggagtagaccataggcagtggaggggtcccatattatccacctgcaagcagtgcccagtggtctatcccagccctgtttgtggttcagatggtcatacctactcttttcagtgcaaactagaatatcaggcatgtgtcttaggaaaacagatctcagtcaaatgtgaaggacattgcccatgtccttcagataagcccaccagtacaagcagaaatgttaagagagcatgcagtgacctggagttcagggaagtggcaaacagattgcgggactggttcaaggcccttcatgaaagtggaagtcaaaacaagaagacaaaaacattgctgaggcctgagagaagcagattcgataccagcatcttgccaatttgcaaggactcacttggctggatgtttaacagacttgatacaaactatgacctgctattggaccagtcagagctcagaagcatttaccttgataagaatgaacagtgtaccaaggcattcttcaattcttgtgacacatacaaggacagtttaatatctaataatgagtggtgctactgcttccagagacagcaagacccaccttgccagactgagctcagcaatattcagaagcggcaaggggtaaagaagctcctaggacagtatatccccctgtgtgatgaagatggttactacaagccaacacaatgtcatggcagtgttggacagtgctggtgtgttgacagatatggaaatgaagtcatgggatccagaataaatggtgttgcagattgtgctatagattttgagatctccggagattttgctagtggcgattttcatgaatggactgatgatgaggatgatgaagacgatattatgaatgatgaagatgaaattgaagatgatgatgaagatgaaggggatgatgatgatggtggtgatgaccatgatgtatacatttgattgatgacagttgaaatcaataaattctacatttctaatatttacaaaaatgatagcctatttaaaattatcttcttccccaataacaaaatgattctaaacctcacatatattttgtataattatttgaaaaattgcagctaaagttatagaactttatgtttaaataagaatcatttgctttgagtttttatattccttacacaaaaagaaaatacatatgcagtctagtcagacaaaataaagttttgaagtgctactataataagtttttcacgagaacaaactttgtaaatcttccataagcaaaatgacagctagtgcttgggatcgtacatgttaattttctgaaagataattctaagtgaaatttaaaataaataaatttttaatgacctgggtcttaaggatttaggaaaaatatgcatgctttaattgca

SEQ ID NO: 8671 - DNA, 659 bp, Homo sapiens
ggttaaagcctggacttttctcactcccttgcaatacttccttcctttacacttaacttttagttccaaggcaggctgtggtacctgctcccggcctcctgtttatatatcataatgtcctatcacctttttttttcagagatcatcactggtatgccagcctcaactgaaggagcatatgtgtcttcagagtctcccattagaatatcagtatccacagaaggagcaaatacttcttcatctacatctacatccaccactgggacaagccatcttgtaaaatgtgcggagaaggagaaaactttctgtgtgaatggaggggagtgcttcatggtgaaagacctttcaaacccctcgagatacttgtgcaagtgcccaaatgagtttactggtgatcgctgccaaaactacgtaatggccagcttctacaaggcggaggagctgtaccagaagagagtgctgaccataaccggcatctgcatcgccctccttgtggtcggcatcatgtgtgtggtggcctactgcaaaaccaagaaacagcggaaaaagctgcatgaccgtcttcggcagagccttcggtctgaacgaaacaatatgatgaacattgccaatgggcctcaccatcctaacccaccccccgagaatgtccagctggtgaa

SEQ ID NO: 8672 - DNA, 1391 bp, Homo sapiens
atagtcattagctgttaacaactagatcaagcatatcacatgtttacatatcccaatttaaatgttcctcctaaacaactatatgatattcttaaagaaaacatcatttaaactgaaacgatgtagattcgaagagaattttattttgtagtgccattatttctgttacatttctgaaagacaatttgagagcctcagacttactcggtacgacactggcatttgcaggaacatatttactggtgaactttgctccaaatataactcaggcaatctcagcaagaacagtacagtattaccttgtcggatggcagttcctgatctatgtgacagatgtctgtttttccttcaagatttacattaaatggaagcctcacagagacaaggctcaggagcttttcctctgatctggtacagaaaagaaaggaaggaagatttgagaagcccagtgtataccagccagagaagaataaagtgcactcactaaaacagcctttcccagcctgtctgctgcagatgggcaatccccatccttgccaaaatgcaaagaggagtggagttttcaaggtcaaactagattttagaaatattaattttctgcattctcctgtatttctataaaagaaaaggaatgaagcatatggtgattctgctaaccctggtggcaattctagcctcattgactgttatttcagtaaaggccgtctcaggcatgatcactttttctgtgatggataaaatgcaactaacttaccccattttctatatcatgtttatcatcatgatagcatcttgtgttttccaagtcaagttcctgaatcaagccacgaaactctacaatacgacaacagtggtgccagttaatcatattttctttacaatcagtgccatcattgcaggtatcatattttatcaggaattccttggtgctccttttctcactgtatttatatatctttttgggtgttttctgtcattccttggtgtatttttggtcacaagaaatcgagaaaaggaacatctgcaacagtcttatattgattttggaaatattcctgggaaacaaatgttggacaaaatacaaccagattcacatagcttatcctatggaactttgcctgatggaagtgactcaacaaagagccaaagtggagagaagaaagaggtctaaatgctgagaaggatggctgttggcctgttattcgataccacctttttaaaaaattgcacatgttcaatttgtgtcagcagctcttttataagctaacatgtgctagcattcatttcagtcctttcccccacctcagcgtctatggacaatcggggacttcctaagctctgacagtctaatatttccatggaatgtgatttggagtgttccccacaccctg

SEQ ID NO: 8673 - DNA, 565 bp, Homo sapiens
aattttctggatgataaacaatggctcaccacaatctctcagtatgacaaggaagtcggacagtggaacaaattccgagacgatgattatttccgcacttggagtccaggaaaacccttcgatcaggctttagatccagctaaggatccatgcttaaagatgaaatgtagtcgccataaagtatgcattgctcaagattctcagactgcagtctgcattagtcaccggaggcttacacacagtgcaaactagaatatcaggcatgtgtcttaggaaaacagatctcagtcaaatgtgaaggacattgcccatgtccttcagataagcccaccagtacaagcagaaatgttaagagagcatgcagtgacctggagttcagggaagtggcaaacagattgcgggactggttcaaggcccttcatgaaagtggaagtcaaaacaagaagacaaaaacattgctgaggcctgagagaagcagattcgataccagcatcttgccaatttgcaaggactcacttggctggatgtttaacagacttgatacaaactatgacctgctattgga

SEQ ID NO: 8674 - DNA, 1588 bp, Homo sapiens
gcatttccagcaggagctgcgagcacagtgctggctcacaacaagatgctcaaggtgtcagccgtactgtgtgtgtgtgcagccgcttggtgcagtcagtctctcgcagctgccgcggcggtggctgcagccggggggcggtcggacggcggtaattttctggatgataaacaatggctcaccacaatctctcagtatgacaaggaagtcggacagtggaacaaattccgagacctttagatccagctaaggatccatgcttaaagatgaaatgtagtcgccataaagtatgcattgctcaagattctcagactgcagtctgcattagtcaccggaggcttacacacaggatgaaagaagcaggagtagaccataggcagtggaggggtcccatattatccacctgcaagcagtgcccagtggtctatcccagccctgtttgtggttcagatggtcatacctactcttttcagtgcaaactagaatatcaggcatgtgtcttaggaaaacagatctcagtcaaatgtgaaggacattgcccatgtccttcagataagcccaccagtacaagcagaaatgttaagagagcatgcagtgacctggagttcagggaagtggcaaacagattgcgggactggttcaaggcccttcatgaaagtggaagtcaaaacaagaagacaaaaacattgctgaggcctgagagaagcagattcgataccagcatcttgccaatttgcaaggactcacttggctggatgtttaacagacttgatacaaactatgacctgctattggaccagtcagagctcagaagcatttaccttgataagaatgaacagtgtaccaaggcattcttcaattcttgtgacacatacaaggacagtttaatatctaataatgagtggtgctactgcttccagagacagcaagacccaccttgccagactgagctcagcaatattcagaagcggcaaggggtaaagaagctcctaggacagtatatccccctgtgtgatgaagatggttactacaagccaacacaatgtcatggcagtgttggacagtgctggtgtgttgacagatatggaaatgaagtcatgggatccagaataaatggtgttgcagattgtgctatagattttgagatctccggagattttgctagtggcgattttcatgaatggactgatgatgaggatgatgaagacgatattatgaatgatgaagatgaaattgaagatgatgatgaagatgaaggggatgatgatgatggtggtgatgaccatgatgtatacatttgattgatgacagttgaaatcaataaattctacatttctaatatttacaaaaatgatagcctatttaaaattatcttcttccccaataacaaaatgattctaaacctcacatatattttgtataattatttgaaaaattgcagctaaagttatagaactttatgtttaaataagaatcatttgctttgagtttttatattccttacacaaaaagaaaatacatatgcagtctagtcagacaaaataaagttttgaagtgctactataataagtttttcacgagaacaaac

SEQ ID NO: 8675 - DNA, 1905 bp, Homo sapiens
agaagagcgggaagaggcggacagcgaggccaagatttcagctgcgggacggtcaggggagacctccaggcgcagggaaggacgtgaggaggggaagcgggctggggcggcagccgggcggaggggcagctgcgcaggcggaatgaggaacgcctttgctctaaggcgaccaccctggcagctcttcactgaggggcctcggtttccacatctgtcgctctccggtcccaagaccaccaggaccgacggggctctccgggagggtcagcccctccggtggccccagtcatgcatcaggggacggatcagaagggctaggaagaggggtcgtggggaaggccccagaaaaaagaggaaggagggaagattttgcctgaagcgggaaagccaagggctgggcggcgcgagacccccattcctagcgactggggctggctggtggcccgcggcagcccccgcgccgggaggattaggcctcccgccgctcccacccgtccggaccctcccacgtgtttaggtcctcccaaaagtattcggcctccggcccctgccccttcccccggctggcctggacctcggggacgtggggggaaccccgtgggagcagggggattctggacggggagggagtagcggttggggagaaggctgagcggggaaaggagagaggggctccggggacggcagggaggagagtgggtcgtgccggagacccagggagagacacaatgggcaagattaggggtgtagggtgggagtgcgaactgactgattcctagcgtgggcagggaactttgctaaaactgcaggccccagggaacagcgcgggcagggtgggagggaacggagagggccaggcggaccctaaggtcaatttggagaaagggccatttccaggctccttcacctgtgcccagcgttctacaggcctggaccccgcccccgctccccaccctccccccagagcagggcgcgggaggaggcggctcgggctggctcggagagctgaggggcgcacacccgcttcgcagggccagggtgacacggaagcatgcgacggctgctgatccctctggccctgtggctgggtgcggtgggcgtgggcgtcgccgagctcacggaagcccagcgccggggcctgcaggtggccctggaggaatttcacaagcacccgcccgtgcagtgggccttccaggagaccagtgtggagagcgccgtggacacggtgagtagcatggcccgggcaggagcggggagggtcgtaccccaggagaccagcgcattcccacgaagggggacagaagtgcttgggctctgagccccagccctttggagaaaaggccactgtccagcctgctggaatgtgactgcgtgagggaggtgcggatcacaccagggcttgctctgcaccctcagctggctaccggccatcctctgcctgcctgtctgtccgcagcccttcccagctggaatatttgtgaggctggaatttaagctgcagcagacaagctgccggaagagggactggaagaaacccgagtgcaaagtcaggcccaatgggaggaaacggaaatgcctggcctgcatcaaactgggctctgaggacaaagttctgggccggttggtccactgccccatagagacccaagttctgcgggaggctgaggagcaccaggagacccagtgcctcagggtgcagcgggctggtgaggacccccacagcttctacttccctggacagttcgccttctccaaggccctgccccgcagctaagccagcactgagatgcgtggtgcctccaggaccgctgcgggtggtaaccagtggaagaccccagcccccagggagaggaacccgttctatccccagccatgataataaagctgctctcccagctgcctctc

SEQ ID NO: 8676 - DNA, 579 bp, Homo sapiens
gcgtgtgtgcgcagggagagaacgccggccaccttcccgcttccgagctgggtgcgcgccgagcacaggagggtgcaatacctgccttgcgtcgcccgtgccgctccagccaccgtcaaatccgggtagcgacccggggcgtttgcagcggtgccgaggaagaggacgggaacggtgttacgattgcctgcgtttaggaggtggctgcgttgtgggaaaagctatcaaggaagaaattgccaaaccatgtctttttttctgttttcagagactaaaatgttcgttcaaatgaatggccattggataactccagacctgaaaataaacactgttgtcaaaacagcatccaggccgggcgcggtggctcacgccagtaattccagcactttgggaggccgaggcgggcagatcacctcagtagttcacaacagatctgagtgttttaattaagcatggaatacagaaaacaacaaaaaacttaagctttaatttcatctggaattccacagttttcttagctccctggacccggttgacctgttggctcttcccgctggctgctctatcacgtggtgctct

SEQ ID NO: 8677 - DNA, 662 bp, Homo sapiens
gctggtgcttagtaaccgactttcctccggactcctgcacgacctgctcctacagccggcgatccactcccggctgttcccccggagggtccagaggcctttcagaaggagaaggcagctctgtttctctgcagaggagtagggtcctttcagccatgaagcatgtgttgaacctctacctgttaggcagcaaatatgaagtctatggaccctgcctcaggttattcaaataacatcctcaccattgatcaaatgctcaagaaaaagcagacttgtatagtggccgatgcaactactattaaacaacatgtgaagagagctactgatacctataatttgggaattgcccttgaacaccgaaaagaaatgctaaacctctggcagaagatccgaggggatttgattgggatagactctagaaatgaggccttttatgacaccttttctacttatacatggtcctggaatgtttgccaagaattactttctcctaaggacttaaggttatatgatgcctatgtgaatagaaattcctcccataactgcagatcctcttcctcatcagataccagtgaatgtgacacagactcaggaagaaaaagaaaacagaaaggtttaaagggatttcaacaatgaaatttctacattttctaaacagctca

SEQ ID NO: 8678 - DNA, 611 bp, Homo sapiens
ccactgtgcccaaccttgtttatatttttatcctgacacatattactctgtgttagagacaaatgttgagtttgatcatttttgcataaaaatggtcacattgtaattagaggttaactgtggaaattgctgttatttaaaacctattgctaacatgatttctaaagttgatgtaggggaaggattatggaacagatttttgcccaaggtgtagatacattttcttttttctccttagctgagaaacaatggtccaagttcattcagcaaggcaatgctccatcttcagtggccttacaaatataataataacactctgttgtatatccttcattatgatattgatggaccaatgaactgcacttcagatatggagatcaaccctttgagaattaagatctcatctttgcaaacaactgaaaagaatgacacggttgccgggcaaggtgagcgggaccatctcatcactaagcgggatcttgccctcagtgaaggagatattcacactttggtaagtgccatttcaaatatgtgcaccatagacatttaaaaatatgtgactatagaactgacgccaaagaacatttcaaaaataacaacagctgtgcttg

SEQ ID NO: 8679 - DNA, 562 bp, Homo sapiens
ctctcctctcctgctatagagggctccgacagcagttcccagccagcgtgttcagcctgcctgcctgcctgcctctgtgtgtgtgtgagcgtgtgtgcgtgcgtctactttgtactgggaagaacacagcccatgtgctctgcatggacgttactgatactctgtttagcttgattttcgaaaagcaggcaagatgtccagcacaccacatgaccccttctattcttctcctttcggcccattttataggaggcatacaccatacatggtacagccagagtaccgaatctatgagatgaacaagagactgcagtctcgcacagaggatagtgacaacctctggtgggacgcctttgccactgaattttttgaagatgacgccacattaaccctttcattttgtttggaagatggaccaaagcgatacagaaccaagaatttaagaccaattggggaaaaaatgaatattaatggaaaatggttcttatgcatcacagcccacctcattccctagttccctctggaggattaattgtcccttctgtctgtgccagtgacatgt

SEQ ID NO: 8680 - DNA, 1032 bp, Homo sapiens; identical to SEQ ID NO: 7909

SEQ ID NO: 8681 - DNA, 2526 bp, Homo sapiens
gaaggtgctccctggccgggagggctcagaagagaagtagggcatggcatcgtcctctgctgaccacctgcactcggctccccgtgcgctgcaggtccctgttccagcagcttctctacggcctcatctaccacagctggttccaagcagaccccgcggaggccgaggggagccccgagacgcgcgagagcagctgcgtcatgaaacagacccagtactacttcggctcggtaaacgcctcctacaacgccatcatcgactgcggaaactgctccaggctgttccacgcgcagagactgaccaacaccaatcttctctttgtggtggccgagaagccgctgtgcagccagtgcgaggctggccggctgctgcagaaggagacgcactgtatcctgcccccgccctccccgccgcccgctccccctctgccccgcgcgccccctccgtgccgccgccgccgtccgcctccttgactccccacccatgcccagcggacggcccggagcagtgtgagctagtgcagagaccgcgataccggagaggcccgcacatctgcttcgactacaacgcgacagaagatacctcagactgtggccgcggggcctccttcccgccgtcgctgggcgtcctggtctccctgcaactgctgctcctcctgggcctgccgccccggccgcagcctcaagtcctcgtccacgcctctcgccgcctctgagcaccctgccccaccccacctccactcccacctcacccggcctcttcgcctttcccaccctcctgccccacactccccgccttagagcctcgtccctccctcactgaaggacctgagctggccaggccctgagagtctggtctgcgccttgggatggggagtcccaaagcgggacgccgcaggtgtttggcacccaaatcacatctcacctccgaactgttcaagtgtccccagacccttcttgcctgctgggctccccccagtgggatgggacagggaggccacacgcactggtgccaaaaccaggcctctgctgccgcccttcctggaggctgcctatgttgggggggaccctgcctcagctgacccggcctctctgccccacccaagcccaaacttggtttctgtgagaatagtggaggaaggtgagatggccagtttgaagcctgtgcctcccagcttaaatcctagcaggagagaggctctggggcagcccccatgggctcctgcccctttcaggcctacagccacatccccaagcccaccaggtgtcaggatagtcacagtgataccagttcagacactaccccatatacacctggaacattgaggatggaaactggactcacattcgacataccccactgggcacacgcacaaacacacacactatggggtggggtgggtgtaggggcttacaaagccttacacagggcgaggggttggtgggagggttggcacctgcacactccatctcctgctcaccacctgcctctaatctgagctgcagcctggctggtcctcccatttctaaagctgaatgtcaaacagtgccaaatgctggggcagggggtgaagaaccctctgtcccacccctagccaccagtgtcctccaagtgccccctcacctctccaggtgctcattgtaaccatttctcactagtgtcaggcccccagtgggaccacatgccactgcctgcacctttcggcagaggaacccccaccagacatcaccctttgccttagcaggggtgactttgtctctcctggctgggccatccttccgccaatctggcccttacacactcaggcctgtgcccactccctatctccttcccacccctacacacacactccctgcttgcaggaggccaaactgtccctcccttgctgaacacacacacacacacacacacacaggtggggactgggcacagctcttcacaccattcattctggtcatttcccccaaaggcatcccagcctgggggccagtggggaactgagggcaaggggatatagtgatggggctcagatggactgggaggagggggagggtgatgcattaattaatggcttcgttaattaatgtcatgttgcttgtcgctttctcagtgtgtgtgtgtggtccatgcccactgctggtgccagggtgggtgtccatgtgcacccggcctggatgccagctgtgtccttcgggggcgtgcgtgtaactgtagtgtagtcaggtgctcaatggagaatataaacatatacagaaaaatatatattttaagtttaaaaaacagaaaaacagacaaaacaatccccatcaggtagctgtctaacccccagctgggtctaatccttctcattacccacccgacctggctgcccctcaccttgggctgggggactggggggccatttccttttctctgccctttttttgttgttctattttgtacagacaagttggaaaaacaacagcgacaaaaaagtcaagaaactttgtaaaatatcgtgtgtgtgattccttgtaaaatattttc

SEQ ID NO: 8682 - DNA, 680 bp, Homo sapiens
agggcaatctgcccagagaatgcggggtgggctgaggcctccgtagaagacagcgccttgcttatgcagaccttgatggaggccatccagatctcagaggctccacctactaaccaggccaccgcagctgctagtccccagagttcacagcccccaactgccaatgagatggctgacattcaggtttcagcagctgccgctaggcctaagtcagcctttaaagtccagaatgccaccacaaaaggcccaaatggtgtctatgatttctctcaggctcataatgccaaggatgtgcccaacacgcagcccaaggcagcctttaagtcccaaaatgctaccccaaagggtccaaatgctgcctatgatttttcccaggcagcaaccactggtgagttagctgctaacaagtctgagatggccttcaaggcccagaatgccactactaaagtgggcccaaatgccacctacaatttctctcagtctctcaatgccaatgacctggccaacagcaggcctaagacccctttcaaggcttggaatgataccactaaggccccaacagctgatacccagacccagaatgtaaatcaggccaaaatggccacttcccaggctgacatagagaccgacccaggtatctctgaacctgacggtgcaactgcacagacatcagcagatgg

SEQ ID NO: 8683 - DNA, 693 bp, Homo sapiens
tgacatcattgtgatcaaatacaacgttaatgacaagttttcattccatgaagtaaaggataattatattccagtgataaaaagagcattaaattcagttccagtaattattgctgctgttggtaccagacaaaatgaagagttaccttgtacatgcccactatgtacctcagacagagggagctgtgttagtacaactgaagggatccaacttgcaaaagaactaggagcgacctatcttgaactccacagccttgatgacttctacataggaaagtattttggaggagtgaaaaaatgcctgtcttaaaggctgaagcgtcacattataactctgacttaaataacttgctgttctgctgccagtgtgtggacgtggtattttacaaccccaatttaaagaaagttgtagaggcccacaagatcgttctctgcgctgtaagccatgttttcatgctgcttttcaatgtgaagagtcccactgacattcaggattccagtatcatccgaactacccaggatctttttgctataaacagagatactgcatttccaggtgctagccatgaatcttcaggcaacccaccattacgagtcattgttaaagacgccctcttctgttcttgtttatcagacatccttcgcttcatttattcaggtgcttttcagtgggaagaattggaagaagatatc

SEQ ID NO: 8684 - DNA, 1235 bp, Homo sapiens
cagtgcaagggagatcatgtttgactgtatggatgttctgtcagtgagtcctgggcaaatcctggatttctacactgcgagtccgtcttcctgcatgctccaggagaaagctctcaaagcatgcttcagtggattgacccaaaccgaatggcagcatcggcacactgctcaatcaattgaaacacagagcaccagctctgaggaactcgtcccaagccccccatctccacttcctccccctcgagtgtacaaaccctgcttcgtctgccaggacaaatcatcagggtaccactatggggtcagcgcctgtgagggatgtaagggctttttccgcagaagtattcagaagaatatgatttacacttgtcaccgagataagaactgtgttattaataaagtcaccaggaatcgatgccaatactgtcgactccagaagtgctttgaagtgggaatgtccaaagaataattccagtgctgaccatcgagtccgactggacctgggcctctgggacaaattcagtgaactggccaccaagtgcattattaagatcgtggagtttgctaaacgtctgcctggtttcactggcttgaccatcgcagaccaaattaccctgctgaaggccgcctgcctggacatcctgattcttagaatttgcaccaggtataccccagaacaagacaccatgactttctcagacggccttaccctaaatcgaactcagatgcacaatgctggatttggtcctctgactgaccttgtgttcacctttgccaaccagctcctgcctttggaaatggatgacacagaaacaggccttctcagtgccatctgcttaatctgtggagaccgccaggaccttgaggaaccgacaaaagtagataagctacaagaaccattgctggaagcactaaaaatttatatcagaaaaagacgacccagcaagcctcacatgtttccaaagatcttaatgaaaatcacagatctccgtagcatcagtgctaaaggtgcagagcgtgtaattaccttgaaaatggaaattcctggatcaatgccacctctcattcaagaaatgctggagaattctgaaggacatgaacccttgaccccaagttcaagtgggaacacagcagagcacagtcctagcatctcacccagctcagtggaaaacagtggggtcagtcagtcaccactcgtgcaataagacattttctagctacttcaaacattccccagt

SEQ ID NO: 8685 - DNA, 573 bp, Homo sapiens
gtctccgctcctgtgggaggcccggggctcgcagcgcgttcgggtgccagggacgagccgagctgctgcccttgactggtgctcaggggaccacagctgcaatgacagtttgggcctgcaaaaagaaggctggaacaacgggagatggaagctttctgcaaatgcagcaccactggtatccatgaatttaacctgcccatcattcttcctaaacaagagactattgaaaagtcagggtgttcaaaatggcttcagatcttatcaggacaatcttggctgttgcactaatttccaaacttgtaagtgcaatggatctgcagttctacttggcaagataaccattttaagttgaatgagaatgacatcacactcacacctgcaaaatctaaaatgtctaataaagtagattcctatgtctgaacttcaattttagggcacagctgtagatgcagaactgatgccatctggtgcgattctacagaataagagagaaaatttacccagagtgtgccatgcactggcttttctgggaatggcaaggtgccaggatttgtttttggttcgcttgcaggg

SEQ ID NO: 8686 - DNA, 2039 bp, Homo sapiens
ggccaggatcatgtccaccaccacatgccaagtggtggcgttcctcctgtccatcctggggctggccggctgcatcgcggccaccgggatggacatgtggagcacccaggacctgtacgacaaccccgtcacctccgtgttccagtacgaagggctctggaggagctgcgtgaggcagagttcaggcttcaccgaatgcaggccctatttcaccatcctgggacttccagccatgctgcaggcagtgcgagccctgatgatcgtaggcatcgtcctgggtgccattggcctcctggtatccatctttgccctgaaatgcatccgcattggcagcatggaggactctgccaaagccaacatgacactgacctccgggatcatgttcattgtctcaggtacacatttggtgcggctctgttcgtgggctgggtcgctggaggcctcacactaattgggggtgtgatgatgtgcatcgcctgccggggcctggcaccagaagaaaccaactacaaagccgtttcttatcatgcctcaggccacagtgttgcctacaagcctggaggcttcaaggccagcactggctttgggtccaacaccaaaaacaagaagatatacgatggaggtgcccgcacagaggacgaggtacaatcttatccttccaagcacgactatgtgtaatgctctaagacctctcagcacgggcggaagaaactcccggagagctcacccaaaaaacaaggagatcccatctagatttcttcttgcttttgactcacagctggaagttagaaaagcctcgatttcatctttggagaggccaaatggtcttagcctcagtctctgtctctaaatattccaccataaaacagctgagttatttatgaattagaggctatagctcacattttcaatcctctatttctttttttaaatataactttctactctgatgagagaatgtggttttaatctctctctcacattttgatgatttagacagactccccctcttcctcctagtcaataaacccattgatgatctatttcccagcttatccccaagaaaacttttgaaaggaaagagtagacccaaagatgttattttctgctgtttgaattttgtctccccacccccaacttggctagtaataaacacttactgaagaagaagcaataagagaaagatatttgtaatctctccagcccatgatctcggttttcttacactgtgatcttaaaagttaccaaaccaaagtcattttcagtttgaggcaaccaaacctttctactgctgttgacatcttcttattacagcaacaccattctaggagtttcctgagctctccactggagtcctctttctgtcgcgggtcagaaattgtccctagatgaatgagaaaattattttttttaatttaagtcctaaatatagttaaaataaataatgttttagtaaaatgatacactatctctgtgaaatagcctcacccctacatgtggatagaaggaaatgaaaaaataattgctttgacattgtctatatggtactttgtaaagtcatgcttaagtacaaattccatgaaaagctcactgatcctaattctttccctttgaggtctctatggctctgattgtacatgatagtaagtgtaagccatgtaaaaagtaaataatgtctgggcacagtggctcacgcctgtaatcctagcactttgggaggctgaggaggaaggatcacttgagcccagaagttcgagactagcctgggcaacatggagaagccctgtctctacaaaatacagagagaaaaaatcagccagtcatggtggcctacacctgtagtcccagcattccgggaggctgaggtgggaggatcacttgagcccagggaggttggggctgcagtgagccatgatcacaccactgcactccagccaggtgacatagcgagatcctgtctaaaaaaataaaaaataaataatggaacacagcaagtcctaggaagtaggttaaaactaattctttaaaaaaaaaaaaaa

SEQ ID NO: 8687 - DNA, 630 bp, Homo sapiens
actcactcacacacaatgtgccatcctgacaaggcttttacttctgataagctccaatgtgtgtttaatgaatacaaagccgcggtctgggtgccgcctcggccgcggccgctctcccgcgctcctttgccagaagtatcaaatgataagaactgagcacactggatgaaataatacttgcactgggagcactaagaaaagattgatctctgggctggtgaacataatctctgtcccagtcagaaaaggagagaggaaattagcagagcgattggtggagaatgatatctgtcaaaagaaacacttggagagcactgagtttagtaataggtgactgccggaaaaaagggaactttgaatattgtcaagataaaccccacttgaaaaactgaggtgcttaaggagtaaaataatatgttcctggtggcatcctccagatcgtactgagaagcactccacaatgccagactcacctgtggatgtgaagacgcaatctaggctgactcctccaacaatgccacctcccccaactactcaaggagctccaagaaccagttcatttacaccgacaacgttaactaatggcacgagccattctcctacagccttgaatggcgccccctcaccacc

SEQ ID NO: 8688 - DNA, 526 bp, Homo sapiens
cggccgcatccccgacacgcaccagcggagccaaagggcgcgcgaggcgatggggttcgcgtgtctgcgcgtttgcagagctgccggacgtcccccgcccgagggttgaagacagcaaaaccccagctgtggggagccggagtgcatcctaacgttagtcaaggctgccaaggaggctgtgcaacatgctcagattacaatggatgtttgtcatgtaagcccagactattttttgctctggaaagaattggcatgaagcagattggagtatgtctctcttcatgtccaagtggatattatggaactcgatatccagatataaataagtgtacaaaatgcaaagctgactgtgatacctgtttcaacaaaaatttctgcacaaaatgtaaaagtggattttacttacaccttggaaagtgccttgacaattgcccagaagggttggaagccaacaaccatactatggagtgtgtcagtattgtgcactgtgaggtcagtgaatggaatccttggagtccatgcacga

SEQ ID NO: 8689 - DNA, 708 bp, Homo sapiens
atttttttttcatttttaaatactgtgctagccaaatagctagagtacaactcaggtgctgctagtattatcccttatactaatccctttttttcttgcaaaatcatgaccatatttcagaagatgtttatcaagtagttttacctttcacataattttctacctcaagttatttgggctcattcttattctgggttaacattacccaaaaacataccgaattgtttttattaatacttaaaatcctgacttgggattattaatttaagaaagcctacaatatactatgcattatgcttattatttttgtaaaatattatatgaaacttaaattatgttattttttattttagggtataaatggttttgaggttcagaaacaaaactgttgctggctactggttacacacaaactttgtgtaaaagatgatgtgattgtagctctgaagaaagcaaatggtgatgccactttgaaatttgaaccatttgttcttcatgtgcagtgtcgacaattgcaggatgcacagattctgcattccatggcaatagattctggtttcaggaactctggcataacggtgggaaagagaggaaaaactatgttggctgtccggagtacacatggcttagaagttccattaagccataagggaaaactgatggtgacagaggaatatattgacttcctgttaaatgtggcaaatcaaa

SEQ ID NO: 8690 - DNA, 2460 bp, Homo sapiens
atggtttgcggtgacactcagaggggatctttgggagatttatagagccggttcttagcgctttgtgggttcagaggctggctgcagtgtttatgaagaggggcagtgggctggggacactgctggggttatggctgtagtgaggtccatgtgtacttgttccttggcatgtgtctgactctgtgttgctgctgcagtacagtgggcaggggcacggttgcttggactgggctgcccgatgtctggcatggctggtggtcctgttgtcctttatttgatcgatagcagggaactgaccgccgaggttggcacaggttggcagggggatgaggatgcattgtggttgtctcctcctcctctccttcttcctcttccccttcctcctctcctttctgttcttgttctccctcatcttcctcttccttcttctccctcttcttcctcttcactctgctctcttctcttcttttcccctttcctctcctctccctttcctcaggtcacagcggagtgaatcagctcggtggtgtctttgtcaacgggcggccactgccggactccacccggcagaagattgtagagctagctcacagcggggcccggccgtgcgacatttcccgaattctgcaggtgtccaacggatgtgtgagtaaaattctgggcaggtattacgagactggctccatcagacccagggcaatcggtggtagtaaaccgagagtagcgactccagaagttgtaagcaaaatagcccagtataagcgggagtgcccgtccatctttgcttgggaaatccgagacagattactgtccgagggggtctgtaccaacgataacataccaagcgtaagttcattgagaacatctgccctccctgccctaagcccaatgctctctcctctttacctcctcccaccctctctctccactgtctcttagtctgtgtcctctccctgctccacatttgtctcctttgtacctgggggaacagagaggaatgccctgacttttctttgactgtctggaaaatgggagtcaagtgtggggagtcattcacttcatttgcatgctgcaaaacagagggcggaggcaccagggaaaggcacttgaatgaagaaggaaaatgagaaccagattgtaacttcgtcctaatccacctgccagaactttccttcaggtgtcacacatccatttccatcctaatattaaacaatataatgaaagaaagctttacaacaagtctaaatagtttttattttcgggcagtcttttaacaaagcaaagcaaccgtgtgagttaggtcaccagagacaccaagcaatggtgaaggaccccctccgcccaattctctatccaactaaatttccatgcccaaagtgatagctatcattttttccacggtgtatctgcaaatccacccactgtcccggggtggctgggagctttttaacgggttgagagttgctttttaaggttgtgggtgagctgagatgggtgactgtgtcttcaggagacactaccatttggtttgattttggtttgatttgcaggtgtcatcaataaacagagttcttcgcaacctggctagcgaaaagcaacagatgggcgcagacggcatgtatgataaactaaggatgttgaacgggcagaccggaagctggggcacccgccctggttggtatccggggacttcggtgccagggcaacctacgcaagatggctgccagcaacaggaaggagggggagagaataccaactccatcagttccaacggagaagattcagatgaggctcaaatgcgacttcagctgaagcggaagctgcaaagaaatagaacatcctttacccaagagcaaattgaggccctggagaaagagtttgagagaacccattatccagatgtgtttgcccgagaaagactagcagccaaaatagatctacctgaagcaagaatacaggtatggttttctaatcgaagggccaaatggagaagagaagaaaaactgaggaatcagagaagacaggccagcaacacacctagtcatattcctatcagcagtagtttcagcaccagtgtctaccaaccaattccacaacccaccacaccggtttcctccttcacatctggctccatgttgggccgaacagacacagccctcacaaacacctacagcgctctgccgcctatgcccagcttcaccatggcaaataacctgcctatgcaacccccagtccccagccagacctcctcatactcctgcatgctgcccaccagcccttcggtgaatgggcggagttatgatacctacacccccccacatatgcagacacacatgaacagtcagccaatgggcacctcgggcaccacttcaacaggactcatttcccctggtgtgtcagttccagttcaagttcccggaagtgaacctgatatgtctcaatactggccaagattacagt

SEQ ID NO: 8691 - DNA, 563 bp, Homo sapiens
atattcacatttttgtacttctagttctgcattccaggaagccgacatagtaagctctaaggacagtggtcatggagacagtgaacagggagatagtgatcatgatgccaccaaccgtgcccagtcagctggtatggatctcttctccaattgcactgaggaatgtaaagctctgggccactcagatcggtgctggatgccttcttttgtcccttctgatggacgccaggctgctgattatcgcagcaatctgcatgttcctggcatggactctgttccagacactgaggtgtttgaaactccagaagcccagcctggggcagagcggtccttttccacctttggcaaagagaaggcccttcacagcactctggagaggaaggagctggatggactgctgactaatacgcgagcgccttacaaaccaccatatttgaagctattgtggaggcagctatgtggagagacacatgtggcacaagatcaagggctgtcaacaaccacatgagtgagcttggaaacagactcccaagttgagcattcagatgagaccacagcccctg

SEQ ID NO: 8692 - DNA, 581 bp, Homo sapiens
ttcgagaatgggacatggaatgaggcgacggccccagcaagccccagcagccccagccccagccccaggcccagcagcagcagcagcagcccctgctctcccgccgcccggagaggctctgcagccatgaagccaaccgtcccgaggtaatcgcagggctggaagcccgtcatcgattctcagggaggctgtcagcgtgcaggggggagcggggagtgtcgtggagacactccgggacccctcactcggttccgctgtgcgtccacttagctgtggtgtcagctgtgtctccgctgatttcaggcaccgccggtaagcagggagcctccgcggagctcccgccgccgctcccccttggcgccaaaggcacccggtcccggagcagccacgcgcggcccgtgagcctcgccaccagcgggggctcagaggaggaggacaaagacggcggggtgctgttccacgtcaacaagagcggcttccccatcgacagccacacctgggagcgcatgtggatgcacgtggccaaggtgcaccctaaggggggagaaatggtgggcgccatcaggaacgccgccttcttg

SEQ ID NO: 8693 - DNA, 857 bp, Homo sapiens
aagtaaaggagcctcactaccacctttttttctttgcgttttcttactgctggtcctgggagccttttccttcggagcagcagccctgtccggcatctgtcttgagctcccagcaaggaaagtccatcagcttgataatggaggagaacaatgactccacggagaacccccaacaaggccaagggcggcagaatgccatcaagtgtgggtggctgaggaagcaaggaggctttgtcaagacttggcatactcgctggtttgtgctcaagggggatcagctctattatttcaaagatgaagatgaaaccaagcccttgggtactatttttctgcctggaaataaagtttctgagcatccctgcaatgaagagaacccagggaagttcctttttgaagtagttccagaggtctacttttccattcagtctgctagctgcaaggaggtttcatcttttggtgaagaagttctcaagtaatatagacggatattttcaatactgttttagagagagccatgtcttcaagaccaggaagtaacagataaaacctcttctccaacattgctattctaaatcatctgtttcacatgcagtgcgtatgacataatggcttttgatgaacaaagcctaagaagtttaagactgtgtaatatggaatatgaaggttgtcctttcaaacaaatttataggaaattcaagcttgcttctgtaattatggacttaaatatagtatgtgagtagatcatttgaaaagatgcttcctgaattattaatacagtatgtaatagctgctaaattaggttttataattctaaatcatcttacggagtgtgaagagaagtgttccaaatgtatctt

SEQ ID NO: 8694 - DNA, 543 bp, Homo sapiens
agtaggtatggagaagccaagggaggcactaagcctctcctgttcctagaacaagttaggctcctgttccttcacccacctttcttcttgtctagctccctactcctgtgagttagcatgtctgaagggtggggcagggagagtaggtccctggttctccaggtcccagggatccatgccttccagtatgtcatctatggaactgcctctttcttcttcctttatggggccctcctgctggctgagggcttctacaccaccggcgcagtcaggcagatctttggcgactacaagaccaccatctgcggcaagggcctgagcgcaacggtaacagggggccagaaggggaggggttccagaggccaacatcaagctcattctttggagcgggtgtgtcattgtttgggaaaatggctaggacatcccgacaaggtgatcatcctcaggattttgtggcaataacaaggggtgggggaaaattgggcgcgagtctgtggcctcgtccccacccaaggctgggtcctctctaggggcctggcattt

SEQ ID NO: 8695 - DNA, 1343 bp, Homo sapiens
atggcttgggccgcgctcctcggcctcctggccgcactgttgctgctgctgctactgagccgccgccgcacgcggcgacctggtgagcctcccctggacctgggcagcatcccctggttggggtatgccttggactttggaaaagatgctgccagcttcctcacgaggatgaaggagaagcacggtgacatctttactgactcttctccacagagagctccaggcactcacagaagccatgtataccaacctccatgcagtgctgttgggcgatgctacagaagcaggcagtggctggcacgagatgggtctcctcgacttctcctacagcttcctgctcagagccggctacctgactctttacggaattgaggcgctgccacgcacccatgaaagccaggcccaggaccgcgtccactcagctgatgtcttccacacctttcgccagctcgaccggctgctccccaaactggcccgtggctccctgtcagtgggggacaaggaccacatgtgcagtgtcaaaagtcgcctgtggaagctgctatccccagccaggctggccaggcgggcccaccggagcaaatggctggagagttacctgctgcacctggaggagatgggtgtgtcagaggagatgcaggcacgggccctggtgctgcagctgtgggccacacaggggaatatgggtcccgctgccttctggctcctgctcttccttctcaagaatcctgaagccctggctgctgtccgcggagagctcgagagtatcctttggcaagcggagcagcctgtctcgcagacgaccactctcccacagaaggttctagacagcacacctgtgcttgatagcgtgctgagtgagagcctcaggcttacagctgcccccttcatcacccgcgaggttgtggtggacctggccatgcccatggcagacgggcgagaattcaacctgcgacgtggtgaccgcctcctcctcttccccttcctgagcccccagagagacccagaaatctacacagacccagaggtatttaaatacaaccgattcctgaaccctgacggatcagagaagaaagacttttacaaggatgggaaacggctgaagaattacaacatgccctggggggcggggcacaatcactgcctggggaggagttatgcggtcaacagcatcaaacaatttgtgttccttgtgctggtgcacttggacttggagctgatcaacgcagatgtggagatccctgagtttgacctcagcaggtacggcttcggtctgatgcagccggaacacgacgtgcccgtccgctaccgcatccgcccatgacacagggagcagatggatc

SEQ ID NO: 8696 - DNA, 2908 bp, Homo sapiens
attgagaatcactgcttttaaagggaaacacgtcattgtaaagaacacgttgtttagcttctgggactagaggcaaggaaaatatcttgcctagattacagcctttatacagttttatacttggaatagtcatggccttccttggtcatatttttggatgacaatcatctgtttttgtgaggaggaatgggatgggcagtaggagtcagcttaaatcgggctccgtgacagccaacgcagtgaccctcgccccttccttggcagcacatcatgcttgtgcagcggcagatgtctgtgatagaagaggacctggaagaattccagctcgctctgaaacactacgtggagagtgcttcctcccaaagtggatgcttgcgtatttctatacagaagctttcaaatgaatctcgctacatgatctatgagttctgggagaatagtagtgtatggaatagccaccttcagacaaattatagcaagacattccaaagaagtaatgtggatttcttggaaactccagaactcacatctacaatgctagttcctgcttcgtggtggatcctgaacaactagatgttcctagacattttctttatggttccaagtgcaaaacaggtgttcttatctaaaacgtcaattagaaaattatctgcggttgttaatctactgtatatttttgtttggtatatttactaagtgcactctttcaaaacttattctataactttatcaattcatgtgaattttagctcaattttcaaagttcactaatattctcaatatttaatgctaaatgctttgctacattgtaactcacctaaaaccttttagtgacaaaatcctaatatgtggaaaaaagcatatgcataaaggaataatattgtgaaaatgaatctgttatgataaagaaaaaataaagtggaaacttttagagtattacttcatagggcagattttgtaaactgtcgtatactgtaaagggttaaatcagcgttttgtgatttttaagtaactgtgagtgaagtttattcttcaacaatgtctactccatccccaacccaactcacagccctatgactactatctttgcattagttaaaaagttagtatataggcatcaaacaaccttggctgtaacctatagaatctctatccacgtatcaggttatagactggtttttcaaaagtgaacaatcctgtgataagttggagtaccatttagtaatacagcaacattgtgtcatttattagcatcataattctttgttatgtaagttaaatatatcaagaaagaagagactgtttggaaaaatgtggttcaagttttatgctatatagttttggtatgcgatacagacagctaacttttcttatgaaaaatacatatttgcatgtaaacaatgatttcaaaatacttgaaaaataaaattttaacccaaatgaataactaagaaatataaaacaagcacaaaatcttagggaagtcataaaatagtagtgaaagtattagacagaagacatctgttttcgaatttcaacactagaatgactaaaactatctacctatagaactatctgtagatagtatactatctacactctgctcaacaagctcagaaattaaatatttttaataataaaaatctgttctggttataaaccttgctaatgaaaatacaatacatataaaaatgtatagccatgttattttctagtataaattcctttgaaactataagtctttgaggaaaattataaggtaaaattttcctgtttttccccctttgaaaaactcaggaaaaaaggaagattgaactaataaaattttatttcttaaatataaatttgacctaaaatattttctcaaactaattcatgaaacagcaacttttaccaatacctttgtatactctcagttctcattcagtataaataaaattttaaaatcctttcatagttctattagaaataagtagtaaattttgatatattgtacatacacacgtgtgtgtgtgtgtgtgtgtgtgtgtgtgtgtgtgtgtgtgtatttgtgtgcctctggtcaactctaaggatgacagacactgtgtaacaacacctgggtcaactcttttaatttatatacaaagcaaagaacaacattaatggagatgcacaatgattattcaaacaagctatatatatgtacaaaggcaaacagacacataacagtctctgcagactgattgtatatagtaagaaaagatcaaaagactttaaaacctaaatgacttttgacatacaaactcttcttgagaatgtttgttgtaaatggtttcaaaaatacaaattatagccaatcaaaacattgctttggttggtgcatttaagtatccaactcaaaaagcatatcaaatattttgggtactaggcagtttccaaagtagcatggtagtattacttgttaaaagggttctgttttcattaacagtactaagtggaagggatctgcagattccaaactggaataagctctatcatattctgaaacaagaattagaatgacttgagaacgggcaaataacaaagcaaaccaatataattatatggtcattctgaccccagctcttatacaaattatacatgtatttttgtgtatgtttgtgagagttgtatgtatgtgaatgtgtgtgagtgtgtattcacatacacatatatactggaacctatagtagaaaaggaaactagtagggccaaaaaaaaaaagaaaaagaaaaagaaaaaagaaaaaaaaagaaaaaactgggacctaagtataaatatctcatcctaaagtaaacaataagtttatagttaacgaagatttttttctatttaaaaccccattttcctaaagaacaaagtagtaaaataaaaaaaaatttaaaaa

SEQ ID NO: 8697 - DNA, 4872 bp, Homo sapiens
gataatacataaattttaaacacagatgaaaaagtggtgtttgctcatcactcctggctatgtaaaatatcttagcttatttattatgggtaggtctatgtagcaatcaatcaatatttccgcagttgagcttctcagcaagcacacgggtttatttattttgattaacagatctctactaggtgatatatatataaccccatttttgtaatgatttaaagattcctacaatagaggaaccctaaatactgtagaggaatgtgaaaataactttagaaagtcagaggaaggaggttttgaagttggtccaggggagaatagaccataggaggccaagaaaggtaagtgaagtcctatgagaataggaactggtatcccattctacccgaagtgaaaaacagaaaatatgataggagtcactgttttgatcttgaagaatctaaatcagtctggaatagtaaatctgaatgaaacaggagcaacttttaaaagggacctgataaagcgcaagtgtcagtagctacatatacaaaagtgacttcagggcaaagcctcattgtcatgaacccaggctctaatccttctcatctcaagaaatctctcctgtctgccctgggccagtgctatccagctgccctctgaatccagcgctcctcacccccagtggggtattgccccttggcagggtgcttatttaccccttacttcaaaattaatcttttctcctttccttcttcccctatccaaacttttatcaactaaaaccttagttaaattgacactaaagttgaatagtaattagcttaagtgtaaagagaagaggtttattaatccacaggcatctctaatcagggaaatgtttcagggagaagggaggagttggctttgggaaagggttccttgcctgcttcagggatccagacacctcctgcccaaccatcctccaaaacaatggaacaaaataataaaataaatgcagcttggtaaaagatacacagtaggctaactgcctgagatttttctaggcaataagtttaaagatccataaacagcatgattgatgggtacagaaccatgcatcatgagctccttatgatgaaagaaaccgttattgccaaaggaaaacttgacttagcacatgacaaagaattcaaatctactttcttgtctcttacaaaaataataggattataacatcaagaacacttcagttggccaggcgtgatggctcatgcccgtaatcccagcactgtgggaggtcaaggtgggcagatcacctgagttcaggagttcaagaccagcctgtccaacatggtgaaactctatctctactaagaatacaaaaaaaaaaaaaatgagctgggtgtggtggcacacacctgtaatcccagctacttgggaggctgaggcaggagaatcacttgaacctgggaggaggaggttgcagtgaatcaagatcacaccactgcactccagcctggacaacaagaatgaaactccatctcaaaaaaaaaaaaccaaaaaaacacttcggctatagtattataatataccccccttatccacagggaatatgttccaagacacccaaggaatgcctgaaaccacagatagtaccaaacctatatatagtatgtctttgtatctgatcactaagacagctactaagtgactcgggggcaggcagtgtatacgatatgaataggctggacatagggatcattcacgttccaggtgagatggagaaggacgatgcagggtttcatcacactattcagaacagtgtgaaattgaaaacttatgaattattcatttccagaatttttcatttaatgtctttggactactgttgacagtgagtaactgaaaccacagaaagtgaaagtacagataagggaggggtactgtaattccatagtagaaatatgaatttgctcataatttttcctggcttagaatatcagcctaatattgaaacatggcttggaatgttttattaactaatttagtaaaaaaaacaaatcagtataagaaatgctcattgatcttaagcattccataggaggagagtctaatttccttacagattatgcagaccattaaaatatgcaaatgaaacatgagataataagttttattagtttttataggtgtatcacaatagccacatattaaatgtgagaatttgaaatggaagacttgccaactgccaagtcatcctaaatgaaagaggaaacaattagaaacagttgagtttagagatatcagaatgcataggtgacatgtttattatattttaaagcatgtttgaaagagaagagaaaagcactagaaatattgtcaccagtgtgattatcaattgaatgttcttttgttttaatttgggccaatgttttcaataggtgatcaacacaacccaagacccctgttcctgggtggataaactttctacagtacaccaccgcatagtgtaaggagaggttacttctttgctctattactctgtttcatatttggttaaagcagggattaccagcatgaagtaatgttcatctgagttcaagaagaaaattgtaatgcaagctttgacttctatctccatgcggcgaggtttttttgtccccagctgaattttaggggctgcagtcttgcagtgatatctggagtactctatggatctacatttgtgccaatcatctacatcaaggaccacagcaaaagaaatgatagtatatatgcaggggcaagccaatatgatttagactatgtgtttgcgcacttcagtggcatctttcttacaagtactgtctactttctggcctactgcatagccatgaaaaatagtcctaaactatatcctgaagcagtcctaccaggattcctgtcaggagtactttgggctatagctacctgctgttggttcatagcaaatcactctctgagtgctgtggtcagttttccaataatcactgctggtccaggatttatagctgcaatgtggggtatcttcatgtttaaggaaataaagggtctacaaaactacctattaatgatacttgcattttgcatcatcttgactggagccttatgcactgctttttctaaaatctaacaatgacaaaaccagcaggtggcagcagtagttaagagaacgcgtctatcggacagcggagagatcatgctgagaaaagagtgcattttcatatagcaaatggatctcagccactgttggagtgggtaaatgatttttttccccaaaaatgtgagaatgaaggaagattgagtttcattcaagtataaaaatgaaaatttcttctgatgaactgtttatgaaggtagtactttactgggtgactaaaatgtctacattattatagcattacatacgaggatgctctttttaccacagtatgtacctagtgttgcataatctagaacacagtatagagtccatatacaaagaagttacagtccatatttctcacctattaccccagtgaagtgaggcagaaataccttgggcgaggagggagagccttaccttctaatggaattagattccaaagatatttggatcctttgtttcataaagtaaatgcatagttggtaactaaatgttaaaaaggccattttattattgttagccaaaacttctgtttatttcaagttaatatcgcccaactctacatcatctacccattttagctcataatgcttttgattatcgccagataaagtccattctcagagaacaaaaatttttcatcattgagaaaatgtgcataacataatacatacatacacaagtatattcacgtacataaatacacacagatatgttgctaaagtgagattgtaggttatcagtaacaatttaaaggaaacaaccactcttttgaatgtacaacttttttttctgaaatacacttttctaaaaccctcttaactggaggtttcctgttttcttcttgttttaactggtggtttccagtaggcaaaataaaatgacaggcatgctagttttttttttttttttttttttttaagaaaactgaaattaagccaggcagggtggcgcactactataatcccagctgctggggcggctgaagtaggagggtcacttagcccaagagtgcaaatctgccagcctaggcaacatagcaaggtcccatctctaaaaaagaaatttaatttaaatttgtaagaaaaaagaaaactgaaacagaactgccagtacaatgtttgttgcaattgtttccaaaactttgagataacgaaacccctattcaaatgtaaattttacccattcccacctgatagtactgtttattactttgctatgcaggagaaacaaaacagctttttatttgtgtgtatactctgaagtcaatgtgcatgggttaaatcccacctctgcttcattttatttgtgtggctttggacaagttcctaagccctctgtgtcaggcccctcattaacaaaatggagtttatgatggcatctacctcacatggttattgtgtggttgaaattagttcaaatctgtaaagtatgttgatgagtatctggtacttggcaaacactatataattgttagctttattattatgtgttgtttgaaggggaaaaaagtttttgtagattggagaacaccatgtaagagctactaagctcaccaccttcccatccaaacaattattactcctctaaatgaatactacttaaaagtgatggagcttctgtttgtttattgaattgctaatacaaataaatatttgactataacttcttatactcattttaattttaacctgaaatgtcattaaattatgctgataaactttgaataaattgtgatacaaaagcta

SEQ ID NO: 8698 - DNA, 1153 bp, Homo sapiens; identical to SEQ ID NO: 6923

SEQ ID NO: 8699 - DNA, 498 bp, Homo sapiens
tgaagctgcggagcgcttttggagcctgtgaatgaaccctcctcctctccctcctccttcttctcgctgagtctcctcctcggctctgacggtacagtgatataatgatgatgggtgtcacaacccgcatttgaacttgcaggcgagctgccccgagcctttctggggaagaactccaggcgtgcggacgcaacagccgagaacattaggtgttgtggacaggagctgggaccaagatcttcggccagccccgcatcctcccgcatcttccagcaccgtcccgcaccctccgcatccttccccgggccaccacgcttcctatgtgacccgcctgggcaacgccgaacccagtcgcgcagcgctgcagtgaattttccccccaaactgcaataagccgccttccaaggccaagatgttcataaatataaagagcatcttatggatgtgttcaaccttaatagtaacccatgcgctacataaaggtgagtgtgctaacaa

SEQ ID NO: 8700 - DNA, 558 bp, Homo sapiens
acactttcattagcagccacaggtactaaataatctgctgttactttctcaagtttaaaaatgaccatcagcccctcttctctaagtatgcaacttttgacggactgctcgttttagattggcagaaaatgtgcttccccagaggtccctgcactcctaatccatgccataatggaggaacctgtgaaataagtgaagcataccgaggggatacattcataggctatgtttgtaaatgtccccgaggatttaatgggattcactgtcagcacaacataaatgaatgcgaagttgagccttgcaaaaatggtggaatatgtacagatcttgttgctaactattcctgtgagtgcccaggcgaatttatgggaagaaattgtcaatacaaatgctcaggcccactgggaattgaaggtggaattatatcaaaccagcaaatcacagcttcctctactcaccgagctctttttggactccaaaaatggtatccctactatgcacgtcttaataagaaggggcttataaatgcgtggacagctgcagaaaatgacagatggc

SEQ ID NO: 8701 - DNA, 768 bp, Homo sapiens
gtggactagagcctgggaagcgggtgacttcaccccccagcccattgtgcttattgtcatggcaacccaatcctcgcttggaatgcggctggtgctttgagatgcaaaaggagctggacaaagagctaggggccccaggcctgagaaaagcaccccccttccctctccttcctgcctccctttccctccctcccttctctctcaggcctggtgagctcaaggggggctggggaaaagcaaggccccaggcatggtggcacagtgcccactggcaccctagcaccaatggatactcctatcctggaatcctggacagggtgaagctctatgagggaccccagcttgtggcggattctggggtgatcattgacacatccatgcgaggggggcgtcttggtgtattctgcttctcccaagaaaacataatttggtccaatctccagtatcgatgcaatgacacagtgcctgaggactttgagccattccggaggcagctgctccagggaagggtgtgaggaggaggccaccagattcagaattcagaattttagaccctttggccttggggtccatcctggagaccctgaggtctaagctacagcccctcagccaaccacagacccttctctggctcccaaaaggagttcagtcccagaggggtggtcaccccacccttcaggggatgagaagttttcaaggggtattactcaggcactaaccccaggaaagatgacagcacattgccataaagttttggttgttttctaa

SEQ ID NO: 8702 - DNA, 597 bp, Homo sapiens
ccgacgctttcttgttgttgcggaataattccatccaaaaccggcagctgttagccgagcaagtgagtagtcacatcacctccagccctctgcattcacgtagcattgctgcggagctggacgagcttgctgatgaccgtatggcactggtgtcaggcatcagcttagatccagaagcagcgattggtgtgacaaaacggccacctcctaagtgggtggatggagtggatgaaattcagtatgatgttggccggattaagcagaagatgaaagaattggccagccttcatgacaagcatttaaacagacccaccctggatgacagcagcgaagaggaacatgccattgagataactacccaagagatcactcaggcatgaagaatcgagaggaaagatcccagcattttttcgacacatcagtaccactaatggatgatggagacgataacactctttaccatcggggttttacagaggaccagttagttctggtggagcagaacacactgatggtggaagagcgggaacgagagattcgccagattgtacagtccatttctgacctgaatgaaatattcagggacttaggggcgat

SEQ ID NO: 8703 - DNA, 483 bp, Homo sapiens
ttttcttttatgaattccttcccatttcctcagatagctcacctgatccctctgcacgtgctgagccctcttcaaacaccctttctggaccctctaggttgcttatggaaccacagagaacagtcccgtgacattcgcgcacttccctgaggacactgtggagcagaaggcagaaagcgtgggcagaattatgcctcacacggaggcccggatcatgaacatggaggcagggacgctggcaaagctgaacacgcccggggagctgtgcatccgagggtactgcgtcatgctgggctactggggtgagcctcagaagacagaggaagcagtggatcaggacaagtggtattggacaggagatgtcgccacaatgaatgagcagggcttctgcaagatcgtgggccgctctaaggatatgatcatccggggtggtgagaacatctaccccgcagagctcgaggacttctttcacacacacccgaa

SEQ ID NO: 8704 - DNA, 9838 bp, Homo sapiens
atgtctctgctttgcgttggagtcaaaaaagccaagtttgatggtgcccaagagaaattcaacacgtacgtgaccctgaaagtgcagaatgtcaagagcacgaccatcgcggtgcggggcagccagcccagctgggagcaggatttcatgttcgagattaaccgtctggatttgggactgacggtggaggtgtggaataagggtctcatctgggacacaatggtgggcactgtgtggatcccactgaggaccatccgccagtccaatgaggagggccctggagagtggctgacgctggactcccaggtcatcatggcagacagtgagatctgtggcaccaaggaccccaccttccaccgcatcctcctggacacgcgctttgagctacccttagacattcctgaagaggaggctcgctactgggccaagaagctggagcagctcaatgctatgcgggaccaggatgaatattcgttccaagatgagcaagacaagcctctgcctgtccccagcaaccagtgctgcaactggaattattttggctggggtgagcagcacaacgatgaccccgacagtgcagtggatgatcgtgacagtgactaccgcagtgaaacgagcaacagcatcccgccgccctattatactacgtcacaacccaacgcctcagtccaccaatattctgttcgcccaccacccctgggctcccgggagtcctacagtgactccatgcacagttacgaggagttctctgagccacaagccctcagccccacgggtagcagccgctatgcctcttccggggagctgagccagggaagctctcagctgagcgaggacttcgaccctgacgagcacagcctgcagggctccgacatggaggatgagcgggaccgggactcctaccactcctgccacagctcggtcagctaccacaaagactcgcctcgctgggaccaggatgaggaagagctggaggaggacctggaggacttcctggaggaggaggagctgcctgaagatgaggaggagctggaggaggaggaggaggaggtgcctgacgatttgggcagctatgcccagcgtgaagacgtagctgtggctgagcccaaagacttcaaacgcatcagcctcccgccagctgccccagggaaggaggacaaggccccagtggcacccaccgaggcccccgacatggccaaggtggcccccaagccagccacgcccgacaaggtgcctgcagctgagcagatccctgaggctgagccacccaaggacgaggagagtttcaggccgagagaggatgaggaaggccaggaggggcaggactccatgtccagggccaaggccaactggctgcgtgccttcaacaaggtgcggatgcagctgcaggaggcccggggagaaggagagatgtctaaatccctatggttcaaaggcggcccagggggcggtctcatcatcatcgacagcatgccagacatccgcaagaggaaacctatcccactcgtgagcgacttggccatgtccctggtccagtccaggaaagcgggcatcacctcggccttggcctccagcacgttgaacaacgaggagctgaaaaaccacgtttacaagaagaccctgcaagccttaatctaccccatctcgtgcacgacgccacacaacttcgaagtgtggacggccaccacgcccacctactgctacgagtgcgaggggctgctgtggggcatcgcgaggcagggcatgcgctgcaccgagtgcggtgtcaagtgccacgagaagtgccaggacctgctcaacgccgactgcctgcagcgggctgcggagaagagctccaagcacggggcggaggaccggacacagaacatcatcatggtgctcaaggaccgcatgaagatccgggagcgcaacaagcccgagatcttcgagctcatccaggagatcttcgcggtgaccaagacggcgcacacgcagcagatgaaggcggtcaagcagagcgtgctggacggcacgtccaagtggtccgccaagatcagcatcaccgtggtctgcgcccagggcttgcaggcaaaggacaagacaggatccagtgacccctatgtcaccgtccaggtcgggaagaccaagaaacggacaaaaaccatctatgggaacctcaacccggtgtgggaggagaatttccactttgaatgtcacaattcctccgaccgcatcaaggtgcgcgtctgggacgaggatgacgacatcaaatcccgcgtgaaacagaggttcaagagggaatctgacgatttcctggggcagacgatcattgaggtgcggacgctcagcggcgagatggacgtgtggtacaacctggacaagcgaactgacaaatctgccgtgtcgggtgccatccggctccacatcagtgtggagatcaaaggcgaggagaaggtggccccgtaccatgtccagtacacctgtctgcatgagaacctgttccacttcgtgaccgacgtgcagaacaatggggtcgtgaagatcccagatgccaagggtgacgatgcctggaaggtttactacgatgagacagcccaggagattgtggacgagtttgccatgcgctacggcgtcgagtccatctaccaagccatgacccactttgcctgcctctcctccaagtatatgtgcccaggggtgcctgccgtcatgagcaccctgctcgccaacatcaatgcctactacgcacacaccaccgcctccaccaacgtgtctgcctccgaccgcttcgccgcctccaactttgggaaagagcgcttcgtgaaactcctggaccagctgcataactccctgcggattgacctctccatgtaccggaataacttcccagccagcagcccggagagactccaggacctcaaatccactgtggaccttctcaccagcatcaccttctttcggatgaaggtacaagaactccagagcccgccccgagccagccaggtggtaaaggactgtgtgaaagcctgccttaattctacctacgagtacatcttcaataactgccatgaactgtacagccgggagtaccagacagacccggccaagaagggggaagttctcccagaggaacaggggcccagcatcaagaacctcgacttctggtccaagctgattaccctcatagtgtccatcattgaggaagacaagaattcctacactccctgcctcaaccagtttccccaggagctgaatgtgggtaaaatcagcgctgaagtgatgtggaatctgtttgcccaagacatgaagtacgccatggaggagcacgacaagcatcgtctatgcaagagtgccgactacatgaacctccacttcaaggtgaaatggctctacaatgagtatgtgacggaacttcccgccttcaaggaccgcgtgcctgagtaccctgcatggtttgaacccttcgtcatccagtggctggatgagaatgaggaggtgtcccgggatttcctgcacggtgccctggagcgagacaagaaggatgggttccagcagacctcagagcatgccctattctcctgctccgtggtggatgttttctcccaactcaaccagagctttgaaatcatcaagaaactcgagtgtcccgaccctcagatcgtggggcactacatgaggcgctttgccaagaccatcagtaatgtgctcctccagtatgcagacatcatctccaaggactttgcctcctactgctccaaggagaaggagaaagtgccctgcattctcatgaataacactcaacagctacgagttcagctggagaagatgttcgaagccatgggaggaaaggagctggatgctgaagccagtgacatcctgaaggagcttcaggtgaaactcaataacgtcttggatgagctcagccgggtgtttgctaccagcttccagccgcacattgaagagtgtgtcaaacagatgggtgacatccttagccaggttaagggcacaggcaatgtgccagccagtgcctgcagcagcgtggcccaggacgcggacaatgtgttgcagcccatcatggacctgctggacagcaacctgaccctctttgccaaaatctgtgagaagactgtgctgaagcgagtgctgaaggagctgtggaagctggttatgaacaccatggagaaaaccatcgtcctgccgcccctcactgaccagacgatgatcgggaacctcttgagaaaacatggcaagggattagaaaagggcagggtgaaattgccaagccactcagacggaacccagatgatcttcaatgcagccaaggagctgggtcagctgtccaaactcaaggatcacatggtacgagaagaagccaagagcttgaccccaaagcagtgcgcggttgttgagttggccctggacaccatcaagcaatatttccacgcgggtggcgtgggcctcaagaagaccttcctggagaagagcccggacctgcaatccttgcgctatgccctgtcgctctacacgcaggccaccgacctgctaatcaagacctttgtacagacgcaatcggcccagggcttgggtgtagaagaccctgtgggtgaagtctctgtccatgttgagctgttcactcatccaggaactggggaacacaaggtcacagtgaaagtggtggctgccaatgacctcaagtggcagacttctggcatcttccggccgttcatcgaggtcaacatcattgggccccagctcagcgacaagaaacgcaagtttgcgaccaaatccaagaacaatagctgggctcccaagtacaatgagagcttccagttcacgctgagcgccgacgcgggtcccgagtgctatgagctgcaggtgtgcgtcaaggactactgcttcgcgcgcgaggaccgcacggtggggctggccgtgctgcagctgcgtgagctggcccagcgcgggagcgccgcctgctggctgccgctcggccgccgcatccacatggacgacacgggcctcacggtgctgcgaatcctctcgcagcgcagcaacgacgaggtggccaaggagttcgtgaagctcaagtcggacacgcgctccgccgaggagggcggtgccgcgcctgcgccttagcgcgggcggtcggccgagcggcactgcgcctgcgcggagggcgctgggcggggagggacggggcttgcgccttggtgggacctccccaggggcggggctcggggggctccacgccaagggtgggctgcgcctacgcccttgactcagctttcccttttggggaattaggaatggaggatgccccgccctctcgggaggccacgcccaagggcgcgacgaaggaaggagccacatccccaacttgaggccacgcccccagcacctagggggcattttgagctgggatgggggaaacctcgtccctatggaggaggccacatcccggggctctggtaccgggaggcaccacctcatgtcccctggaaaagccataagatgggacccagacccctgggaccccagaccaattgccaagtatggaaatctcagctccctcgagggggggccctgggcaaggggtagggctctctggagcgcccctctaggtggcctggggactggagggaccaggatgctggttggagggccccggaataccggagtccctttagatatttgtgcaaaaaataaatggggggaggggggaggatgggatttcaaaagcacatgcgcccttgggcgcccaaaccctgggggccgaggggacggctctggttccccacgctgcccctacttccctttgggagtttgcctctccctctcccccaacaaacccagtcctcatatcatagagttcaacacacccatttgacagatggcaaaactgaggcttaaagagctgcttgagacttggccaaggttccaggtgccataccctctgtgcccctcccttaggcctgtgtgccccatggaagggtgggctgagatcgggatgacctgacacagctccctattgctgctaattccccctcggcctcctccaaggggtgggaattccaggccaagacccctacttcgcctttccttctccggctgccaagcaggacctttgccctcagccctttctcctgggatctccatgggggatgccatgagggcctcccaccacaaaagagaatttgggatcccctggtcccaggtttctccatcccttcttccttttccagaattttccaaataggaaagaacagaaggagaccagaaactctaggggggagaaagagaatgagagaaagagaatgagagagagagaaacacaaacacagtgacacagtgagagcttagtctccaagagcctattcattgattcaaacacccaagccacaggatacctcagatggccctcttgccagctggaagctctttctccaatgagcaaagttacagtgacctggctggagttacctggtgcacataggaccttaggggaaagttcagcgtggactacacttgctctgggatctgcttttccacatgtgtgtatggcacgcctttttctgctggattgggaaggacaagattttgctgtgctagggagaaatgaaaacggggtgagctgagtagctgggtttctggaggatagaacatcagatggggaggctttccgaggtgaagaatgagagggaaccacttactagagagaaaagagctccaggcctggggaacagcacgtgcgaaggccaggagagaagaactgttgaaacaacgagaagggtggcacggctggagctgagccagcaagggggatcgtgaggagccttggggttggggagatctgcagaagcatcagaccaggcagggcctcgtacgcagtcctgaggagttttacttttattctaagacagttggggagctccaggagctgttttaagttggggagagactggattccagcctgcaaaagctgttttgtgaagactaaaaccagtgaggagaggtggaggtgctttggggacactgaaatggattcttggaaagattctgaaggctgtgttgaaaagacacctatagctgtggggacatgactataatcccagcatttggggagaccgaggctggcagatcacttaaggtcaggagtttgagaccagcctggccaacatggcgaaaccccatctctgctaaaaatacaaaaattagctgggtgcagtggtgcatgcctgtagtcccagctactcaggagactgaggcgggagaattgtttgaaccctggaggcagaggttgtagtgagtcgtgatcacacaactgcactccagcctgggcaacagaacaatactccattccctcccctctaccccaccaaaaaaaaaaaaaaatcctgcccttagatgagctctagggctgctgagtacagttgtcccagttgcacagtgcccaagggtttggcattgctaagaaggccacgtgcaaatcctagatattgagtgttgtatgtttgtgacgttggtttcccgacatgtgaatggcccaagtgtctggaagaagtggcgccactttctaatttgcttggagatgttgcatgtcccttaaattcagacaggtgcaggtaactggaggttctgaaccaaaggttaaaatgcaaattctcatacagggttgggaagttgtagccagggataagcttatgtgactgttatatggactgaggagcagatgtgaatttcgaaccatgacatggctgagggtaggggtcgggtggatggatgattcagggttgtaacccatagagcccaaaggggaagtgatctgtgacctggggtgagggtgatctggaagatttttggatggctggaaagaaatggggaagtcgagctgcctgagagagccaagttatttcccaaaagattccttaggagtctttctgttcaagacctccgtgtgtgtgtgtgtgtgtttagggttccccagcaatggcccaggcatgtgaaggaaacaagcttcttcagggaatatttgttgaatgagttttcctgactcccaggctagaactgtttttgcaatttccaccctcttttctttcccccagagaactcctattcgtccttcaaaacccatcacggaaacccctcttggagaaaaccctccttccttcccctcaggactttcccagccaccgtctctcctccagtccagcctgatgccatgggactgggggtttctctgtccagctctgtttctcccagactggggtctgaggactctcaggacccccaactttacctagcacaggctgggcacaagtgggtgacagggagtctacgcctagtggaattatgtattggggcagggtcagtgtgagaatacacatccgcatgcatgtctgtccatgtctgtccgtaccaaccttccccttccacacggacctgggcacataggaggtgtctgagcctgacacatgggacagagagtggacatggctgagacacggacagagaaaagacaaggagtccagggggctgaaagccttttgaaatcaggaagttcctgtattggcagaacaaagcccagagaggagcagggctttcctcaacgccacccagcaagtggacacagagcccggccttggatgacacctccagggttctgaaccctggacctcgctttatgcaaggagctggccccacatttccatgaatcggggaaacagcacaagaaggttggcctgtggcagggcaagggttaaaggggtgacattgagggatgcctcagagtcaaagtcccctgaccaagaggaatagagtagaaaacacagagacagagggtgagatcacgccccgatgaggacggagagagacagagatggagagagacatagaggtggaaatatacagagaaagataaatgcagagaccaaggcagggagtgtcgggggaagtaaagagggtgtcctgaagaaagaaggatctgttcactcttaccagtctgtcctcgaatgatttgcataaaatgaggaggtgcctgtccacacccccaattcctctctcaggccccagagcctgagacctcaccatgcccccatcagagatgcaaaaaactaaacacccaactagaaatccttgggacctctctcggctgggatctcagagcctttctgtcccctacccctaccccatgtgctgtcgattttgcagatggggacaacctggggcctcccggaactctgccaccctggggaagttgggggagggccttagtcccggatcacaaccccgtctgctccccagaatcctttcctaagaatcgttgaggaccaaagttgtctttgctgacacgtgttgcttttctctttgccttttattgtttcagagaaaaatcaagttgactgtgtcaagtaacaccccaccccttacccccgtccagccatagtggctctctggagacacaggtcacaggcggagggtcccctgatcatccccaaccacacagccagggggacttgacccctgtccacccctgtctcgtgctccctcagacccccacaaaccggccaagcagtccggggaggcttcccctccacacaactcttagcatgtgattgcagatgtgaaatcaaaacgttgtttgttttttgttttgttttgattctaccccgtcggtccagtgtctgcacagacgccttcatttctctgtaaatatgtgacttggaacaaatgtttaacacaaacgagaagtggtcatgaatgcatggtgttgagatgttttgcactattctgactttttggtctctgtaaaaatattttattaacagcagacattaaaaaaagaaaaaccacacacagccttgga

SEQ ID NO: 8705 - DNA, 1061 bp, Homo sapiens
ttaagcccgggctcgcgctctcggaccgtgctttcgccgcctgggagccgtccggcgcagcagtttctaggtccccactgtccccgccgtcccgccccttcgcgtcccgggaaccggctggcttccgagccgcactcgccgatcctccaggcatgccccgctacgagctggctttaatcctgaaagccatgcagcgggttgtttacattcagagctctatcaataagaggaatacatattacagtgaattcgacaaccgcacaagttggcagttgataggtatatcgagaacagccagagactgctgctactttgaaacgtacgatagaggccctgatggacagaggagcaatagtgagggacttggaaaacctgggtgaacgagcgcttccttataggatctctgcccacagtcagcagcacaacagaggcgggtatttcttggtggatttttatgcacccaccgcagctgttgaaagcatggtggagcacttgtctcgagatatagatgtgattagagggaatattgtcaaacaccctctgacccaggaactaaaagaatgtgaagggattgtcccagtcccactcgcagaaaaattatattccacaaagaagaggaagaagtgagaagattcgccagattttagccttatatgtaattccttcacatttgggcagcatggacgagaaggaagaatttgcaagtttggcctttatataagcatgtgttgcaggtgctgtttgatttttctaaggtatttttagcccttgatcccctttgcttgcgagaggtggggaactgctcactgacagcttctctgtaacctgcagtaccagtggatcgttcttgattttgttttcattagtgtcatttctttgtcattgaggacttttccccttacaacagtaacaccattttttgaagagcaaaacttataatacctcctgggattgtgagctagtcattcagcctgtgtaaccatgtggaaataaaaattgacgaccaatgtattatatggacaacttttgctttgagtaataaacttgattgtaggaatgtg

SEQ ID NO: 8706 - DNA, 3569 bp, Homo sapiens
tcctgtttcacacagaagaaaactgaggttaaaaggggttggcactcatcatgagcccctgttctcattctgcaaatggtgaagctctctattgtcctgaccccacagttcctgtcccatgaccagggccagctcaccaaggagctgcagcagcatgtaaagtcagtgacatgcccatgcgagtacctgaggaaggttatcaatactctggctgaccatcatcatcgtgggactgactttggtggaagtccttggttacatgtcattattgcgtttccgacaagttataaagttgtcattaccctctggatagtttacctttgggtgtctctcctgaagactatcttctggtctcgaaatggacatgatggatccacggatgtacagcagagagcctggaggtccaaccgccgtagacaggaagggctgaggtccatttgtatgcacacaaagaaaagagtttcttcctttcgaggaaataaaattggcctgaaagacgtcattactctacggagacatgtggaaacaaaagttagagctaaaatccgtaagaggaaggtgacaacgaaaatcaaccatcatgacaaaatcaatggaaagaggaagaccgccagaaaacagaaaatgtttcaacgtgcgcaagagttgcggcggcgagcagaggactaccacaaatgcaaaatccccccttctgcaagaaaggctctttgcaactgggtcagaatggcggcagcggagcatcgtcattcttcaggattgccctactggccctacctcacagctgaaactttaaaaaacaggatgggccaccagccacctcctccaactcaacaacattctataactgataactccctgagcctcaagacacctcccgagtgtctgctcactccccttccaccctcagcggatgataatctcaagacacctcccgagtgtgtgctcactccccttccaccctcagcggatgataatctcaagacacctcccgagtgtgtgctcactccccttccaccctcagcggatgataatctcaagacacctcctgagtgtctgctcactccccttccaccctcagcggatgataatctcaagacacctcccgagtgtctgctcactccccttccaccctcagctctaccctcagctccaccctcagcggatgataatctcaagacacgtgccgagtgtctgctccatccccttccaccctcagcggatgataatctcaagacaccttccgagcgtcagctcactccccttccaccctcagctccaccctcagcagatgataatatcaagacacctgccgagcgtctgcgggggccgcttccaccctcagcggatgataatctcaagacaccttccgagcgtcagctcactccccttccaccctcagctccaccctcagcagatgataatatcaagacacctgctgagcgtctgcgggggccgcttccaccctcagcggatgataatctcaagacaccttccgagcgtcagctcactccccttccaccctcagctccaccctcagcagatgataatatcaagacacctgccgagcgtctgcgggggccgcttccaccctcagcggatgataatctcaagacaccttccgagcgtcagctcactgcccttccaccctcagcagatgataatatcaagacacctgccgagcgtctgcgggggccgcttccaccctcagcggatgataatctcaagacaccttccgagcgtcagctcactccccttccaccctcagctccaccctcagcagatgataatatcaagacacctgccttccaccctcagcggatgatctcaagacaccttccgagcgtcagctcactccccttccaccctcagctccaccctcagcagatgataatatcaagatacctgctgagcgtctgcggattccgcttccaccatcagccgatgataatctcaagacaccttccgagcgtcagctcactccccttccaccctcagctccaccctcagcagatgataatatcaagacacctgccgagcgtctgcgggggccgcttccaccctgagcggatgataatctcaagacaccttccgagcgtcagctcactccccttccaccctcagctccaccctcagcagatgataatatcaagacacctgccgagcgtctgcgggggccgcttccaccctcagcagatgataatctcaagacaccttccgagcgtcagctcactccccttccaccctcagctccaccctcagcagatgataatatcaagacacctgccgagcgtctgcgggggccgcttccaccctcagcggatgataatctcaagacaccttccgagcgtcagctcactccccttccaccctcagctccaccctcagcagatgataatatcaagacacctgccgagcgtctgcgggggccgcttccaccctcagcagatgataatctcaagacaccttccgagcgtcagctcactccccttccaccctcagctccaccctcagcagatgataatatcaagacacctgccgagcgtctgcgggggccgcttccaccctcagcggatgataatctcaagacaccttccgagcgtcagctcactccctttccaccctcagctccaccctcagcagatgataatatcaagacacctgccgagcgtctgcggggagcgtctgcgggggccgcttccaccctcagcggatgataatctcaagacaccttccgagcgtcagctcactccccttccaccctcagctccaccctcagcagatgataatatcaagacacctgccgagcgtctgcgggggccgcttccaccctcagcggatgataatctcaagacaccttccgagcgtcagctcactccccttccaccctcagctccaccctcagcagatgataatatcaagacacctgccgagcgtctgcgggggccgcttccaccctcagcggatgataatctcaagacaccttccgagcgtcagctcactccccttccaccctcagctccaccctcagcagatgataatatcaagacacctgccgagcgtctgcgggggccgcttccaccctcagccgatgataatctcaagacacctcccttagctactcaggaggctgaggcagaaaaaccacgcaaacccaagaggcagagggcggctgagatggaaccacctcccgaacccaagaggcggagggtcggtgacgtggaaccgtcacgcaaacccaagaggcggagggccgctgacgtggaaccatcatcacccgaacccaagaggcggagggtcggtgatgtggaaccgtcacgcaaacccaagaggcggagggccgctgacgtggaaccatcatcacccgaacccaagaggcggagggtcggtgacgtggaaccgtcacgcaaacccaagaggcggagggccgctgacgtggaaccatcattacccgaacccaagaggcggaggttgagctgagaagaggccagtgcactcaagcctgagcaataagaataaaaccgagtagaacaaaataaaaaattcaaaaaacaaaacaaaacccacactcc

SEQ ID NO: 8707 - DNA, 637 bp, Homo sapiens
ggtgtatttgaagagaaaggaggctcctatggggctcttcttactgcattaacaaggaccagagtattttaagactctttgaggggtgtgaaggaattggctgtgttctttaaaatacatgtatatttttaaaagtgtgtgtgtgtgtgtgtgtgtgtgtgttcctgagggcctgtgcaagcaactgggctttacgacttgcactttttggaggatctgacccctaccctggagagaattgaagcgacaccaagaaaggtacagcttttggttgctatgattatacacacactctgtagaacaggacaccccctttcttgaaacccgagccatgtggctattgctggaatgtgaagagactttctaagcattggtgccttgattggactaggaattgctgcccttgttttactcgcctttgtcatcagtgtctgtgtcctttgctatttatttctgtatacgaaacctcaaagattagacactggccttaagcttcaacacttagaggcttcttccactcaagaaggcaagtcaaatggaaaaaccaaagccctcaattcaaatgcagcatcaaatgcaacaaatgaaacatactatgaagctgatgatataattcaagaaaaaacaatggatgcaa

SEQ ID NO: 8708 - DNA, 1660 bp, Homo sapiens
gcgccgtcctcggaaacgcctagaccccggcagctaggccgggaggcaccgcccactcctctagagcggagcgtggcccaggttgagccgccgcaccgtgggtctcgggtctcggtgacgagcagctgcccgcctccggtgagcgcgggagaaggggcccagtggggcagtgggcgacgcggagggcccaggcccaggccgcggccgcgccgcatccgctggttgtccaccttgccttgccccagggtgcaatacctgccttgcgtcgcccgtgccgctccagccaccgtcaaatccgggtagcgacccggggcgtttgcagcggtgccgaggaagaggacgggaacggtgttacgattgcctgcgtttaggaggtggctgcgttgtgggaaaagctatcaaggaagaaattgccaaaccatgtctttttttctgttttcagagtagttcacaacagatctgagtgttttaattaagcatggaatacagaaaacaacaaaaaacttaagctttaatttcatctggaattccacagttttcttagctccctggacccggttgacctgttggctcttcccgctggctgctctatcacgtggtgctctccgactactcaccccgagtgtaaagaaccttcggctcgcgtgcttctgagctgctgtggatggcctcggctctctggactgtccttccgagtaggatgtcactgagatccctcaaatggagcctcctgctgctgtcactcctgagtttctttgtgatgtggtacctcagccttccccactacaatgtgatagaacgcgtgaactggatgtacttctatgagtatgagccgatttacagacaagactttcacttcacacttcgagagcattcaaactgctctcatcaaaatccatttctggtcattctggtgacctcccacccttcagatgtgaaagccaggcaggccattagagttacttggggtgaaaaaaagtcttggtggggatatgaggttcttacatttttcttattaggccaagaggctgaaaaggaagacaaaatgttggcattgtccttagaggatgaacaccttctttatggtgacataatccgacaagattttttagacacatataataacctgaccttgaaaaccattatggcattcaggtgggtaactgagttttgccccaatgccaagtacgtaatgaagacagacactgatgttttcatcaatactggcaatttagtgaagtatcttttaaacctaaaccactcagagaagtttttcacaggttatcctctaattgataattattcctatagaggattttaccaaaaaacccatatttcttaccaggagtatcctttcaaggtgttccctccatactgcagtgggttgggttatataatgtccagagatttggtgccaaggatctatgaaatgatgggtcacgtaaaacccatcaagtttgaagatgtttatgtcgggatctgtttgaatttattaaaagtgaacattcatattccagaagacacaaatcttttctttctatatagaatccatttggatgtctgtcaactgagacgtgtgattgcagcccatggcttttcttccaaggagatcatcactttttggcaggtcatgctaaggaacaccacatgccattattaa

SEQ ID NO: 8709 - DNA, 781 bp, Homo sapiens
gtgatgctgacactgctggttcagggaccacgcttggagaaccactacactagggcaagcaggaagagagtcctccttctggaactgaagcaggcagtgtgaagacccatgtggaacaccttaacccgaagcctctctgaccatccagttggcaaagaccctcaggccatgaggactggccaaagacagtgagaggacgtgcaagggtaaattcctgagccccgcagtcttatttcctgccctgacgtccctgcataccagcccaagggttaaccgtaagctgatgcctgtatggcggccttactgatgccacgcaggaacaaagggatgaggactcgactgggatgcctgtctcacaagtcagactcgtgtagtgatttcacagctattcttccagacaaacccaaccgcgctctcaagagattatcgacagaagaagctacgaggtgggcagattcctttgatgtgcttctctctcataagtatttcacaaaagaagagctgtgatcctgatgctattctcatcatgaatttcaaagcagtgatttgtttctggatcaaagaagttttggcatcactattagtatatgtatcctggattttagaaatgtaatttccattcttttcctctatctggtcttggaacccattcaccagcttattttctccagttgttcggggatacaagaggactctggtttttaggacagcattttcataaatagagaacttaaaataaattgtttttgttgttgtgctcttgtatttttccaagcctggg

SEQ ID NO: 8710 - DNA, 592 bp, Homo sapiens
gatccctcccatctcacagtacctcacaggtctcttcccccgagcagtgcattgctggagcgaggagaagctcacgaatcagctgcaggtctctgttttgaaaaagcagagatacagaggcagaggaaaagggtggactcctatgtgacctgttcttagagcaagacaatcaccatctgaattccagaagccctgttcatggttggggatattttctcgactgcatggaatcagaaagaagcaaaaggatgggaaatgcctgcattcccctgaaaagaattgcttatttcctatgtctcttatctgcgcttttgctgactgaggggaagaaaccagcgaagccaaaatgccctgccgtgtgtacttgtaccaaagataatgctttatgtgagaatgccagatccattccacgcaccgttcctcctgatgttatctcattatcctttgtgagatctggttttactgaaatctcagaagggagttttttattcacgccatcgctgcagctcttgtgagaaatatttatatcatgactatttttaatatggcatatatttggataagccttctagtaaaatgatctcaatattaa

SEQ ID NO: 8711 - DNA, 1419 bp, Homo sapiens
cagagcgcgcgaggttcggggagctcggccaggctgctggtacctgcgtccgcccggcggcctccccgaatgtttccaaagatctggggcgggagcgggcggagactgccgccaggagcctcccggccgccccagggctgcgcagccactggagcccatcacccaactccagacgctcctggctcctctacgtgggccgggagggacagccttgaggactaggggagggggcacgggaccttgcagagctcctggccggaaagggaggattgaccgcccccggcatatcaccccggagcactggaacccgcccccgcttcttgttttggcactggtggtgcttgcgagcaggacaggctgctttggtttgtgacctccaggcaggacggccatcctctccagaatgaagatcttcttgccagtgctgctggctgcccttctgggtgtggagcgagccagctcgctgatgtgcttctcctgcttgaaccagaagagcaatctgtactgcctgaagccgaccatctgctccgaccaggacaactactgcgtgactgtgtctgctagtgccggcattgggaatctcgtgacatttggccacagcctgagcaagacctgttccccggcctgccccatcccagaaggcgtcaatgttggtgtggcttccatgggcatcagctgctgccagagctttctgtgcaatttcagtgcggccgatggcgggctgcgggcaagcgtcaccctgctgggtgccgggctgctgctgagcctgctgccggccctgctgcggtttggcccctgaccgcccagaccctgtcccccgatcccccagctcaggaaggaaagcccagccctttctggatcccacagtgtatgggagcccctgactcctcacgtgcctgatctgtgcccttggtcccaggtcaggcccaccccctgcacctccacctgccccagcccctgcctctgccccaagtggggccagctgccctcacttctggggtggatgatgtgaccttccttgggggaccgcggaagggacgagggttccctggagtcttacggtccaacatcaggaccaagtcccatggacatgctgacagggtccccagggagaccgtgtcagtagggatgtgtgcctggctgtgtacgtgggtgtgcagtgcacgtgagagcacgtggcggcttctgggggccatgtttggggagggaggtgtgccagcagcctggagagcctcagtccctgtagccccctgccctggcacagctgcatgcacttcaagggcagcctttgggggttggggtttctgccacttccgggtctaggccctgccccaaatccagccagtcctgccccagcccacccccacattggagccctcctgctgctttggtgcctcaaataaatacagatgtccccca

SEQ ID NO: 8712 - DNA, 1683 bp, Homo sapiens
aaaagtcggctggtagcggggaggatcgcggaggcttggggcagccgggtagctcggaggtcgtggcgctgggggctagcaccagcgctctgtcgggaggcgcagcggttaggtggaccggtcagcggactcaccggccagggcgctcggtgctggaatttgatattcattgatccgggttttatccctcttcttttttcttaaacatttttttttaaaactgtattgtttctcgttttaatttatttttgcttgccattccccacttgaatcgggccgacggcttggggagattgctctacttccccaaatcactgtggattttggaaaccagcagaaagaggaaagaggtagcaagagctccagagagaagtcgaggaagagagagacggggtcagagagagcgcgcgggcgtgcgagcagcgaaagcgacaggggcaaagtgagtgacctgcttttgggggtgaccgccggagcgcggcgtgagccctcccccttgggatcccgcagctgaccagtcgcgctgacggacagacagacagacaccgcccccagccccagctaccacctcctccccggccggcggcggacagtggacgcggcggcgagccgcgggcaggggccggagcccgcgcccggaggcggggtggagggggtcggggctcgcggcgtcgcactgaaacttttcgtccaacttctgggctgttctcgcttcggaggagccgtggtccgcgcgggggaagccgagccgagcggagccgcgagaagtgctagctcgggccgggaggagccgcagccggaggagggggaggaggaagaagagaaggaagaggagagggggccgcagtggcgactcggcgctcggaagccgggctcatggacgggtgaggcggcggtgtgcgcagacagtgctccagccgcgcgcgctccccaggccctggcccgggcctcgggccggggaggaagagtagctcgccgaggcgccgaggagagcgggccgccccacagcccgagccggagagggagcgcgagccgcgccggccccggtcgggcctccgaaaccatgaactttctgctgtcttgggtgcattggagccttgccttgctgctctacctccaccatgccaagtggtcccaggctgcacccatggcagaaggaggagggcagaatcatcacgaagtggtgaagttcatggatgtctatcagcgcagctactgccatccaatcgagaccctggtggacatcttccaggagtaccctgatgagatcgagtacatcttcaagccatcctgtgtgcccctgatgcgatgcgggggctgctgcaatgacgagggcctggagtgtgtgcccactgaggagtccaacatcaccatgcagattatgcggatcaaacctcaccaaggccagcacataggagagatgagcttcctacagcacaacaaatgtgaatgcaggtgaggatgtagtcacggattcattatcagcaagtggctgcagggtgcctgatctgtgccagggttaagcatgctgtactttttggcccccgtccagcttcccgctatgtgacctttggcattttacttcaatgtgcctcagtttctacatctgtaaaatgggcacaatagtagtatacttcatagcattgttataatgattaaacaagttatatatgaaaagattaa

SEQ ID NO: 8713 - DNA, 832 bp, Homo sapiens
gagaaggggaaagagaaagagagatcattgaagaaaatcatctagggagtttgggttttgttgtagatgatttccttaaaaaggaacaaaagaaaaacaaaaacttctgtgcccagattttcatggtttaaagagggagttttttagcttgctacttgatcttctgcatatcaaataaaaaactagaatatattcaaatgtgctcaactgcgttgctttaaataattttgtggtgcttctttttagcatttgatgaatacagaaatatcagccaaaaggacattgtggacagcataaaaggagaattatctgggcattttgaagacttactgttggccatagttaattgtgtgaggaacacgccggcctttttagccgaaagactgcatcgagccttgaagggtattggaactgatgagtttactctgaaccgaataatggtgtccagatcagaaattgaccttttggacattcgaacagagttcaagaagcattatggctattccctatattcagcaattaaatcggatacttctggagactatgaaatcacactcttaaaaatctgtggtggagatgactgaaccaagaagataatctccaaaggtccacgatgggctttcccaacagctccaccttacttcttctcatactatttaagagaacaagcaaatataaacagcaacttgtgttcctaacaggaattttcattgttctataacaacaacaacaaaagcgattattattttagagcatctcatttataatgtagcagctcataaatgaaattgaaaatggtattaaagatctgcaactactatccaacttatat

SEQ ID NO: 8714 - DNA, 572 bp, Homo sapiens
agtgtgtgtgctggggctggggcggctacatagctgtgactaccagggggtgcagtctctggggaccaccactaccgaggctgggtaccatgattatcgcggaacacctgcccattaatcttgaccctgttaaaacaataactgcctatccagatatgccacacttctgcctgctgttggcaaccctcctggactaggctgctcttgttaatcacatggatgttgttccttaaggttgccagcatgaaagtgcttcagatggctttgagtcctaatcttgtggttctgttcactgaagatcagaaactgaaaaaacaacctgaaagttggcaaagaaaggattctgtggtttttctaagtctctcaagccagtggacagccacggcactcagcataattgggctgattactctgagtgcaaaccttttcactgttccagagaggagcctgacaaccacattctccttctcaaggtgtggtgcttactgcgcaggctgaccagatataagagttcggaccgcccagcacacaaggtcagcatgctgctcctctgtcacgctctcgctatagct

SEQ ID NO: 8715 - DNA, 764 bp, Homo sapiens
agtgttgatacaacagagctgcctcctggctctttgggagcctgggaggagaaggagccgggaggggcgctgcggggaagccacctgcggattcactggctgctgctccgcccaggactgctagcaagcacggagggctgccagacctggggctccctgctccgtgcgtcaggttggggaaaccaccgtctgccccagaccctgacccaggacccgcctggaggaagctgggaccgaggctgggccaagatggtgtctgtgtttcgaagcgaggagatgtgtttgtcacaactgtttctccaggtggaagctgcatattgctgtgtggctgagctcggagagctcggattggttcagttcaaagatttaaatatgaatgtgaacagctttcaaaggaaatttgtgaatgaagtcagaaggtgtgaatcactggagagaatcctccgttttctggaagacgagatgcaaaatgagattgtagttcagttgctcgagaaaagcccactgaccccgctcccacgggaaatgattaccctggagactgttctagaaaaactggaaggagagttacaggaagccaaccagaaccagcaggccttgaaacaaagcttcctagaactgacagaactgaaatacctcctgaagaaaacccaagacttctttgagacggaaaccaatttagctgatgatttctttactgaggacacttctggcctcctggagttgaaagcagtgcctgcatatatgaccggaaagttggggtt

SEQ ID NO: 8716 - DNA, 337 bp, Homo sapiens
ggcggtggccctgctctagggaggccgggtctcttcagggaaacagaagctgcccacagccagaaagccaggaccacccgaactggacagggagcagggagggaggagtggtcgcacggagcgtacctgattcaacaggaaatcagttattttctaaaacagcccctaccagagcctcctgaactctgtgggcaccacgtgctgctgtgagcatctgcccagacagtgacccgccacaggccccgggcgtctgtggaaggagttttgtaaaggaaaaaaaaacacacacacacaaacattttttcaatgtagcaaaatcaaacttaaaaaaaaaaaa

SEQ ID NO: 8717 - DNA, 332 bp, Homo sapiens
gaaatcaatgcacaattgaagtctggggagggattccctctccttaaccatctctccctcttaactccccttaggtatttgctgacctgtttgaccctgtgatccaagagcgacacaatggatatgacccccggacaatgaagcacaccacggatctagatgccagtaaaatccgttctggctactttgatgagaggtatgtattgtcctctagagtcagaactggccgaagcatccgaggactcagtctgcctccagcttgcactcgagcagagcgacgagaggtggaacgtgttgtggtggatgcactgagtggcctgaagggtgacctg

SEQ ID NO: 8718 - DNA, 1366 bp, Homo sapiens
aggtccgcgatggagccatctgcactgggaccttggtccttgttccctgaccttgcgccgagggaccaggaaggtcaggtgctcgccccgcgtcggtgcttcaggagggaatgtggccagaacgagaaagtggtgatcatgtgtgcgagcagtgacaccatccggagcatcatgctggtggcgcacaggcatggcatgaccagtggagactacgccttcttcaacattgagctcttcaacagctcttcctatggagatggctcatggaagagaggagacaaacacgactttgaagctaagcaagcatactcgtccctccagacagtcactctactgaggacagtgaaacctgagtttgagaagttttccatggaggtgaaaagttcagttgagaaacaagggctcaatatggaggattacgttaacatgtttgttgaaggattccacgatgccatcctcctctacgtcttggctctacatgaagtactcagagctggttacagcaaaaaggatggagggaaaattatacagcagacttggaacagaacatttgaaggtatcgccgggcaggtgtccatagatgccaacggagaccgatatggggatttctctgtgattgccatgactgatgtggaggcgggcacccaggaggttattggtgattattttggaaaagaaggtcgttttgaaatgcggccgaatgtcaaatatccttggggccctttaaaactgagaatagatgaaaaccgaattgtagagcatacaaacagctctccctgcaaatcatgtaagtctggagacttaatttgctatgtatgtcatcacctctaacctcagtgtaatgtaagtttaaaacccaagtgtttctagggccttacattttggaattttacatttctttctctgatgtggtaaaacgcatgggaacagttcacaaactggcatctttcaggtcttccttcccttccagtcttctcttccacaatggtagaatgtttcttcctatttttacatctcttactataatctcttggctaggtcatgtttccacttttagagaaaatcaaaatatcaattagtaaatatcactcccttattcatctgtcacagcaagtctcgttctgatttttcaagtttgtggttactttccagctcctcagaaccaaagagataacatcctttaaacatctgaacatttacacattggcaaataagtgtaagatgtattacttatgagcagctttgtatataagtagagaagcaattggatgttctcataagtagcttacaaataggaaagctgttagaaataattgttttagagaataaggtagtgagggagaacaaagtgaatataggtccttca

SEQ ID NO: 8719 - DNA, 553 bp, Homo sapiens
ctctctccctctctccctttccaaatgattcagaagtcgataagaccaggagaagtgaagatgtaacatgttatctgtcgctcctcttagctggcggagagaatttacatttaaagattagcagagtgagaaagagaaatctgccttttgttgtgtggggtgaggaggaggcatctacccctggccttgacgctatctcccatcacctctgctatccagacaggactcaccgagtatcaaatgataagaactgagcacactggatgaaataatacttgcactgggagcactaagaaaagattgatctctgggctggtgaacataatctctgtcccagtcagaaaaggagagaggaaattagcagagcgattggtggagaatgatatctgtcaaaagaaacacttggagagcactgagtttagtaataggtgactgccggaaaaaagggaactttgaatattgtcaaggcgcacgcgcccagcaccctgcctccggcgatgccgccccagcccctctgatggccctcctctctgctgccactcattccagaaca

SEQ ID NO: 8720 - DNA, 645 bp, Homo sapiens
atggcagcccttccccatctgtaatatccaaagccaccgagaaagagactttcactgatagtaaccaaagcaaaactaaaaagccaggcatttctgatgtaactgattactcagaccgtggagattcagacatggatgaagccacttactccagcagtcaggatcatcaaacaccaaaacaggaatcttcctcttcagtgaatacatccaacaagatgaattttaaaactttttcttcatcacctcctaagcctggagatatctttgaggttgaactggctaaaaatgataacagcttggggataagtgtcacggtactgtttgacaagggaggtgtgaatacgagtgtcagacatggtggcatttatgtgaaagctgttattccccagggagcagcagagtctgatggtagaattcacaaaggtgatcgcgtcctagctgtcaatggagttagtctagaaggagccacccataagcaagctgtggaaacactgagaaatacaggacaggtaacagatcattataccaaccttttacagtaccttagaagagcaaaacaatgtgtgaataacatcagttctcattgagatctctaaatttgtcagctaatcaagaaaccaagcctgatatatataaccatctggg

SEQ ID NO: 8721 - DNA, 1503 bp, Homo sapiens
aacaaaactacagcaagacacagaaaggtgtgagctctggaactacacagttcatccattctccatgcagtctttcattttgaaaggagccaccttctatagaagatatttatttactccccacaagagatgaaagaaatcctgtagtatatggagtctttactacaaccagctccatcttcaaaggctctgctgtttgtgtgtatagcatggctgacatcagagcagtttttaatggtccatatgctcataaggaaagtgcagaccatcgttgggtgcagtatgatgggagaattccttatccacggcctggtacatgtccaagcaaaacctatgacccactgattaagtccacccgagattttccagatgatgtcatcagtttcataaagcggcactctgtgatgtataagtccgtatacccagttgcaggaggaccaacgttcaagagaatcaatgtggattacagactgacacagatagtggtggatcatgtcattgcagaagatggccagtacgatgtaatgtttcttggaacagacattggaactgtcctcaaagttgtcagcatttcaaaggaaaagtggaatatggaagaggtagtgctggaggagttgcagatattcaagcactcatcaatcatcttgaacatggaattgtctctgaagcagcaacaattgtacattggttcccgagatggattggttcagctctccttgcacagatgcgacacttatgggaaagcttgcgcagactgttgtcttgccagagacccctactgtgcctgggatggaaatgcatgctctcgatatgctcctacttctaaaaggagagctagacgccaagatgtaaaatatggcgacccaatcacccagtgctgggacatcgaagacagcattagtcatgaaactgctgatgaaaaggtgatttttggcattgaatttaactcaacctttctggaatgtatacctaaatcccaacaagcaactattaaatggtatatccagaggtcaggggatgagcatcgagaggagttgaagcccgatgaaagaatcatcaaaacggaatatgggctactgattcgaagtttgcagaagaaggattctgggatgtattactgcaaagcccaggagcacactttcatccacaccatagtgaagctgactttgaatgtcattgagaatgaacagatggaaaatacccagagggcagagcatgaggaggggaaggtcaaggatctattggctgagtcacggttgagatacaaagactacatccaaatccttagcagcccaaacttcagcctcgaccagtactgcgaacagatgtggcacagggagaagcggagacagagaaacaaggggggcccaaagtggaagcacatgcaggaaatgaagaagaaacgaaatcgaagacatcacagagacctggatgagctccctagagctgtagccacgtagttttctacttaatttaaagaaaagaattccttacctataaaaa

SEQ ID NO: 8722 - DNA, 1296 bp, Homo sapiens
atgtaaaataagtttctttgttttgctgatagtctagttctccaaagagctttttcaatctttatcaatctttaaagttaaatagctttcctaatagtcctttgaaaggatgattgtatttatatgttaatgaagctcaggtacctgacaatgatgagcagtttgtaccagactatcaggctgaaagtttggcttttcatggcctgccactgaaaatcaagaaagaaccccacagtccatgttcagaaatcagctctgcctgcagtcaagaacagccctttaaattcagctatggagaaaagtgcctgtacaatgtcagtgcctatgatcagaagccacaagtgggaatgaggccctccaacccccccacaccatccagcacgccagtgtccccactgcatcatgcatctccaaactcaactcatacaccgaaacctgaccgggccttcccagctcacctccctccatcgcagtccataccagatagcagctaccccatggaccacagatttcgccgccagctttctgaaccctgtaactcctttcctcctttgccgacgatgccaagggaaggacgtcctatgtaccaacgccagatgtctgagccaaacatccccttcccaccacaaggctttaagcaggagtaccacgacccagtgtatgaacacaacaccatggttggcagtgcggccagccaaagctttccccctcctctgatgattaaacaggaacccagagattttgcatatgactcagaagtgcctagctgccactccatttatatgaggcaagaaggcttcctggctcatcccagcagaacagaaggctgtatgtttgaaaagggccccaggcagttttatgatgacacctgtgttgtcccagaaaaattcgatggagacatcaaacaagagccaggaatgtatcgggaaggacccacataccaacggcgaggatcacttcagctctggcagtttttggtagctcttctggatgacccttcaaattctcattttattgcctggactggtcgaggcatggaatttaaactgattgagcctgaagaggttagtttaatagattttaattaggacactcagacatgttataacataaagaaactgacacatttgattaatataccaaaaatgtattcttaatcatttcaagactttagggaaactttctgaattaaaaagcatgcaaagataaaacatgtctacctttaaaatcaccaatgtattgcgtgttccttccggttgtatacaatcctacaaaattgatgttggagaaaattaa

SEQ ID NO: 8723 - DNA, 551 bp, Homo sapiens
atgtgcccccccagccccctgggctgcgagctggtcaaggagccgggctgcggctgctgcatgacctgcgccctggccgaggggcagtcgtgcggcgtctacaccgagcgctgcgcccaggggctgcgctgcctcccccggcaggacgaggagaagccgctgcacgccctgctgcacggccgcggggtttgcctcaacgaaaagagctaccgcgagcaagtcaagatcgagagagactcccgtgagcacgaggagcccaccacctctgagatggccgaggagacctactcccccaagatcttccggcccaaacacacccgcatctccgagctgaaggctgaagcagtgaagaaggaccgcagaaagaagctgacccagtccaagtttgtcgggggagccgagaacactgcccacccccggatcatctctgcacctgagatgagacaggagtctgagcaggtgcatctcggggattccctcattccctcccagcttttgaccttttcctgcatctaaatggacattcatggcggcaggaggtgctagactag

SEQ ID NO: 8724 - DNA, 1678 bp, Homo sapiens
aattgaagggaggaggacccttaggaaggaaagaaaaagagaatgtacttttcaggctaaggtttctgggttttaaaaccatcacttcagaaatcaaaatattttagcagaaaaacccccatgagaaagcttcaaggtctcggctgtgacaaagacaacatttcagtagaagtttaaggttgcgtgttgtgggcttgggaaggggtagagatctttatttcctttcattctaattctgtgccactgatacctgccagtaaaatacatgaaacatattccagaaagagttgatttagtagatgaaaaatgcgtctcccgagaccagagaaggagtgattcgggaaagttacctcaaaggccacgaccagctggttcccgtcaccctcttggccattgcagtcatcctggctttcgtcatgggggccgtcttctcgggcatcaccgtctactgcgtctgtgatcatcggcgcaaagacgtggctgtggtgcagcgcaaggagaaggagctcacccactcgcgccggggctccatgagcagcgtcaccaagctcagcggcctctttggggacactcaatccaaagacccaaagccggaggccatcctcacgccactcatgcacaacggcaagctcgccactcccggcaacacggccaagatgctcattaaagcagaccagcaccacctggacctgacggccctccccaccccagagtcaaccccaacgctgcagcagaagcggaagcccagccgcggcagccgcgagtgggagaggaaccagaacctcatcaatgcctgcacaaaggacatgccccccatgggctcccctgtgattcccacggacctgcccctgcgggcctcccccagccacatccccagcgtggtggtcctgcccatcacgcagcagggctaccagcatgagtacgtggaccagcccaaaatgagcgaggtggcccagatggcgctggaggaccaggccgccacactggagtataagaccatcaaggaacatctcagcagcaagagtcccaaccatggggtgaaccttgtggagaacctggacagcctgccccccaaagttccacagcgggaggcctccctgggtcccccgggagcctccctgtctcagaccggtctaagcaagcggctggaaatgcaccactcctcttcctacggggttgactataagaggagctaccccacgaactcgctcacgagaagccaccaggccaccactctcaaaagaaacaacactaactcctccaattcctctcacctctccagaaaccagagctttggcaggggagacaacccgccgcccgccccgcagagggtggactccatccaggtgcacagctcccagccatctggccaggccgtgactgtctcgaggcagcccagcctcaacgcctacaactcactgacaaggtcggggctgaagcgtacgccctcgctaaagccggacgtaccccccaaaccatcctttgctcccctttccacatccatgaagcccaatgatgcgtgtacataatcccagggggagggggtcaggtgtcgaaccagcaggcaaggcgaggtgcccgctcagctcagcaaggttctcaactgcctcgagtacccaccagaccaagaaggcctgcggcagagccgaggacgctgggtcctcctctctgggacaca

SEQ ID NO: 8725 - DNA, 2947 bp, Homo sapiens
ctgattttatgatagcctattgaaactcaaatatacgtatgatgtctaaacattttcatttacaaattactctagtcaaagctgggctttttctaattgttagctttggaacaaaaaggaacagatttactaattgtttctctgtgctgtggaactttgccaatctgtatttattcttgacatgtgcacatatgtgtgttgtgcctatatcaaaatgagctattaaaaatagttttggaagaagttcatttttaaccactgaaaaaaggaccataaatatgtggtcattaaagtccttatgatggatggatatggttaaattagaaaaacttaccccagggcaaggaattttctgtcaccagtcctttcctggaaatggtaagtttcatccttttgaccctgctctagaaagcaacccacagcgagatggacatagactaaaggcctgtactcacagaacttcacagccaagagacttcattcaatacctgtcagagtgtaaccatggactacccaaatcacctgagctgcatgtagatatttagatttctgcacctctcctgttcctacaggatcagaacctcagaaggaggggagagaggagcctgtaaagctgcctttgagcatgcactgctgttggttcttatgtatgacaaacttaggacaacttctctggtccatatgctcatggtgtatagatgacaatactaagccccagagagaagaaataactgctccaagtgcacgcagaaccagaaatccttaccgtataacctagtggtttcgtacacctagctgtctgactgatgcctgctttgaatgccaatggatgagtcatttcctatgaatgggaaaggagaaggtggcataagttcagacccagagtgtgctacagttcttggtctttagaaccaacagaccccctgaagagtgagaaactgggtcttcctcagcctagaacttccagccagtagtccagagtttaggcacagctaaagcataattacggggttgtggggatgtggtggtatagccagcactctgaaagcttccagcaccctccccccttccctggatgggtgccttctgcaggatgccttccacggactaagggtctggcttaggccatggaaagattcttccgttttgccaaaatgagtgttaccagataactgtcactagtggaatgtatatatacaaagattgcaaatactctgtttttgaagggatttcatttttatttctgatttcttggactatgaagtcttcactcttaattagcaagaaagaaaaaatgatgtgaatgaggtgctgtcctgaaaagaatcaggagtgagtttttaggcattgacatcattgaccaagcttagggacgttgccaggagtgagctgaattagttgctaacttcgaatgtgggagggctggggtgaatggtcactgtgaaccccagctgtcagcccctgaaacctggtggacctaaccctgactccagagatagaggagttcttctcatcagcctaactctaacctgaactcactgggtcaccttgagcatgtcaccagggctttctgagccctagccccttgtctttaagataaggggtagaattagagcaccataaactgagctttatggagctccagacttccaggagtgtgtgcctggaggtggagggtggaggacaaacagagagggaacattcccttcccccagtcttgcctttaaggacagtagctctgcctctaggttttatatatttgtgtacatgtaaagttttctttgaagcaaattttaaagattaaccaccaatcaactaggtattttattctagttgtggattagaatttcctggagcatcttccaatacagaacaaaacaaaaacacacatctctacatctcttctccacttcacttccctaccaccctgcccaaatatcctgccataataggttggcagtgaggtcccaagcatcagtatttctgagtagcaaatggctcagaaatccccagagagcctgacctctgacctggtgttcctccccaggcatgccagggaagagtaacgtggcatctctgcgccaggcccctgggcagaacggaaccagcttccacggctgcatccggaacctttacatcaacagtgagctgcaggacttccagaaggtgccgatgcaaacaggcattttgcctggctgtgagccatgccacaagaaggtgtgtgcccatggcacatgccagcccagcagccaggcaggcttcacctgcgagtgccaggaaggatggatggggcccctctgtgaccaacggaccaatgacccttgccttggaaataaatgcgtacatggcacctgcttgcccatcaatgcgttctcctacagctgtaagtgcttggagggccatggaggtgtcctctgtgatgaagaggaggatctgtttaacccatgccaggcgatcaagtgcaagcatgggaagtgcaggctttcaggtctggggcagccctactgtgaatgcagcagtggatacacgggggacagctgtgatcgagaaatctcttgtcgaggggaaaggataagagattattaccaaaagcagcagggctatgctgcttgccaaacaaccaagaaggtgtcccgattagagtgcagaggtgggtgtgcaggagggcagtgctgtggaccgctgaggagcaagcggcggaaatactctttcgaatgcactgacggctcctcctttgtggacgaggttgagaaagtggtgaagtgcggctgtacgaggtgtgtgtcctaaacacactcccggcagctctgtctttggaaaaggttgtatacttcttgaccgtgtgggactaatgaatgcttcatagtggaaatatttgaaatatattgtaaaatacagaacagacttatttttattatgagaataaagactttttttctgcatttgg

SEQ ID NO: 8726 - DNA, 522 bp, Homo sapiens; identical to SEQ ID NO: 8240

SEQ ID NO: 8727 - DNA, 853 bp, Homo sapiens
aaaatatttcttccctccctagcctggccgtgtggtgacgctccttgaagatcatgagggctgcacttggggcgtggcataccaagtgcaaggggagcaggtaagcaaggccctgaagtacctgaatgtgcgagaggcagtgcttggtggctacgataccaaggaggtcaccttctatccccaagatgctcctgaccaaccactgaaggcattggcctatgtggccaccccacagaaccctggttacctgggccctgcgcctgaagaggccattgccacgcagatcctggcctgccggggcttctccggccacaaccttgaatacttgctgcgtctggcagacttcatgcagctctgtgggcctcaggcgcaggacgagcacctggcagccatcgtggacgctgtgggcaccatgttgccctgcttctgccccaccgagcaggctctggcgctggtgtgaggggctgagcccctgcggggagtgctcatgtggacatcagggccagacacccactccagtgcacaagacagacttgcgaccgcttgagcccactgagcagatatggtgggtggctggaggcttctctttctcagtccctgcctgtctgccagcctgcagctctcctgcttgacactgacttactacttgaaactttatttattgcaccatgttggtgtggtgggcaggtggagggcctgccctggacacaggggccctgctgagcagtggccccatcctggaacttgaccagattccccccagtgctgctgctaaccccacaccacccaggcctccacctccccagggagtctccaagagcctcgatcctctgctcactcagcccagccatcc

SEQ ID NO: 8728 - DNA, 3722 bp, Homo sapiens
tattgagcactgactgtataccctgcatgtgctaagtgctttacgtgcactctcgaatttaacattagaagtactcaccatgtcaggatttttccacttatgtatgtggaggttgcagtgagccaagattgcaccactgtactcaagtctgggcaacagagtgagaccctgtctcaaaaaaaaaaaaaaatttagagatgggggtgttgctatgttgcccaggttggactcgaactcttggactcaagcattcctcctgcctcagcctcctgaatagctgggactaaaggcatatgccatcacacccagctggtaaaatcaactttcaataagcatgaagggtagtgatgaagagatcagggctagagccagatggcctgaattcaaatcctgctttctcctctctagctgtgtagtagctgtgggcaagttacttaaactctttgagcctctgatttctcacctgtccagggcgggtatgaacaggcccacctcacagtgttgcaaggattcagtgagttcgcatgaagtgattagaagtgattggggctgggtgcggtggctcacgcctgtaatcccagaactttgggaggctgaggcaggcagatcacttgaggccgggagttcgagaccagcctgaccaacatggagaaaccctgtctctactaaaaatgcaaaattagccggacgtggtagcacatgcctgtaatcccagctactcgggaggctgaggcaggagaatcgcttgaacctgggaagcggaggttgcagtgagccgagattgcgccattgcactccagcctgggcaacaagagcaaaaaaaaagaagtgattgggctgactgagtccacgccacatgaagggattagaagcgatgcatagtgaatgtgcagaaagtcctctcttaaggattagggtcaagaagaaaaagaaaggaaagggaaagtgctcaccatttgagacctgtctggaaattgctgtacttagtgtaaatttcttctcagcttcaacatctttgatcgtgattttatcaggaaaatactaataaagccactgttttgttcaacttctgatacttgctttttgaaaagataataatacctttgcctttttaaggattcagtgaaaatgctgttcttcaacttcattttggggtgcagtaggattcactgcttcacatgctccttgtgcacacatttgagtgcctactgtatgcaggcactacaggggagacagggtgaccaggacaagtcttccaacctcaagaagcttcaagtctattggggttgggatggagtagtggcaccacccaccccccccatcaccataagcaggagacacaagccaaggaggttctgtatgggaggcccactgacactgctggagctacttagtggggcacgctccaggaaagcttcccagaggaaggggcttcccatcccagaggtctaagaccttaaagccccaccaggtattagttcatatctccagcctctaacatattcctagagacagaattgttcaagtgggacttgtagaactcagctgtgccccagaacctccaagatgccccaggctggaaccacactggcctctcctctctgccaaaggccccttcaaggatgaggcccaaatccactaaaggactgtttaccacccaattatattccagaccagagaggcaagctggcagcctgcatgccaaacccaacaaaaatatgtgttttagtggcccatagagtatttctttgcactgaattatcaccaggacttaaatcaacattttatctatttaaccaacattatcaccaacatttgtcaccaggagagttcatgtaaaactgcacatttccagcctcttttgaaagcttcggtgaggcagcctcagcctaaatttgcccggggcagtgatgggggcactgaacaagactattcctcacagtccatcgggagccgtggagggtgctaagcagaggaggaacaggatccctctggctatgtgtggaaaatggactgcagggatgagggagcccagcggggaggtgaggtgactgcaaccatccaggcaagaaaggatggtggccagaccaggtgggagcagtgggcagtgggtttgattctcgcactgttttaaatgaagagacttcctgggggttatacgcaaggtggtaaggatgacgccaggtctcctgtcctaagccattggaaagatgggattgcctaaagctagggagggaaaccaccagtgggcagaggaaaccaggatcccatggtgagttcgagatgcccctcagacacccaggtgggagcgtcagggaggcagcctgttgggggtctggagttcagggctgaggtgggggctggagagagagatgaggagcggccagtgtagagatggtgcttagtgccccaggcctcggagtgggcacaactagggagaggacccggggccactcaacctggagaggtcaccttccgcctgggaagcccagcagggcacagggcagagcttctgccctcctttcctggagggcccgctgacccctccggcgtcccttcccctctctcccagggccactgttcccagatgtgccacaacgtcttcatcgtggagtcggtgtgcgtgggctggttctccctggagttcctcctgcggctcattcaggcgcccagcaagttcgccttcctgcggagcccgctgacgctgatcgacctggtggccatcctgccctactacatcacgctgctggtggacggcgccgccgcaggccgtcgcaagcccggcgcgggcaacagctacctggacaaggtggggctggtgctgcgcgtgctgcgggcgctgcgcatcctgtacgtgatgcgcctggcgcgccactccctggggctgcagacgctggggctcacggcccgccgctgcacccgcgagttcgggctcctgctgctcttcctctgcgtggccatcgccctcttcgcgcccctgctctacgtcatcgagaacgagatggccgacagccccgagttcaccagcatccctgcctgctactggtgggctgtcatcaccatgacgacggtgggctatggcgacatggtccccaggagcaccccgggccaggtagtggccctgagcagcatcctgagcggcatcctgctcatggccttcccagtcacctccatcttccacaccttctcccgctcctacctggagctcaagcaggagcaagagagggtgatgttccggagggcgcagttcctcatcaaaaccaagtcgcagctgagcgtgtcccaggacagtgacatcttgttcggaagtgcctcctcggacaccagagacaataactgagcgcggaggacacgcctgccctgcctgccatctgtggcccgaagccattgccatccactgcagacgcctggagagggacaggccgcttccgagtgcagtcctggcgcagcaccgactcccacgcacccggggaaggacaccctcactcccacaccccgggaagaacactagaacatcagcagaggggccctgcccctccgcctgcagccgtgaaaggaagctgggtcatcagcccagccccgcccaccccagcccctatgtgtgtttccctcaataaggagatgccttgttcttttcaccatgcaaataacatgcccagcaaaaacttgctttatgggtctgcctggagaaaaaaaaaaaaaatacaaacagcagaaacagc

SEQ ID NO: 8729 - DNA, 382 bp, Homo sapiens
agatggcagcccaggctttggcgctgctgagagaggtagcgaggctggaagcgccgctggaggagctacgcgcgcttcactccgtgctgcaggcagtgccgctcaacgagcttcgccagcaagcggcggagctgcgcctcggcccgctcttctccctgcttaacgagaaccatagattggaagaattgttgaaaattctgatgctgttactgagattctaaataatgctgaattactaaaacaaattgtttattgcattggtggagagaatctatctgtagcaaaagcggctatcaaatccctgtcaagaatatcactaacccaagctggactggaggctttatttgaaagcaatctgctggatgatttgaaaagtgtaatg

SEQ ID NO: 8730 - DNA, 623 bp, Homo sapiens
acctgagctacatgaagtgttcttggctccctggaaggaataccagtcccgacactaactatactctctactattggcacagaagcctggaaaaaattcatcaatgtgaaaacatctttagagaaggccaatactttggttgttcctttgatctgaccaaagtgaaggattccagttttgaacaacacagtgtccaaataatggtcaaggataatgcaggaaaaattaaaccatccttcaatatagtgcctttaacttcccgtggtccaacctctccatactgccacattggggatgaagtttcaacatgagtttgggagaagataaacattcaaatcatagcaggaacccaggccatctgactctaagtgaaacctgatcctccacatattaaaaacctctccttccacaatgatgacctatatgtgcaatgggagaatccacagaattttattagcagatgcctattttatgaagtagaagtcaataacagccaaactgagacacataatgttttctacgtccaagaggctaaatgtgagaatccagaatttgagagaaatgtggagaatacatcttgtttcatggtccctggtgttcttcctgatactttgaacacagtc

SEQ ID NO: 8731 - DNA, 779 bp, Homo sapiens
gaaggaaagcgcatgcgcgtcgggcacagcgcgtgcagcctcgtgcagctcttctggtctccggcgcccgcccctcagacgtaatgttgaattaaagaaaatactttatcagaagaagatggccactgcccagttgcagaggactcccatgtgttctactttcccttgaattttagagtgcactggtatttcccaataagatatcaactgaacaccagtctttggtgttagtgaagaggcttctagcagtttcagtatcctgtatcacgtatttgaggggaatattcccagaatgcgcttatggaacaagatatctagatgatctttgtgtcaaaatactgagagaagataaaaattgcccaggatctacacagttagtgaaatggatgctaggatgttatgatgctttacagaaaaaatatgtaagtcttgcaatctctttatccttttttttctacagtttatgatctacaaatataactggagttatgatgtagtaaaacattcatttgaactaacttgagtgtaggtcagtctgaattactgaaaagcctaaacatttgaatattttaaagactaatcatcaactcatttaaagataatggaattaacactaaacaaatttttccaagctagtttttttaacacttatttgtattaataacacgtgttaacttacaaaaaagttaatgaattaaagagtcttttcaaatagtttattcattagtttcacatgccttctacaagcttgtttatactaataatttaataaattattt

SEQ ID NO: 8732 - DNA, 661 bp, Homo sapiens
cctgagccctgcggaacctcggcgctcggccccaccccgcccgtacctgcacttatttattgttgttatttcttaccgcggagccccgcagtcgggtcctcccgcccgctcccgcgcagcgctagcattctccagtccctcagtcccttcccgcgcggtgcgccgcagccgaggcgatgcgcctcattcagaacatgtgcaccatcgccgagtaccccgcgccgggcaacgccgcggcctccgactgctgtgtgggcgccgccggccgccgcctggtcaagatcgccgtggtgggcgccagcggcgtgggcaagaccgcactggtggtccggttcctcaccaaacgattcatcggtgactatgaaagaaatgcaggtgagacaatgcatttgagaaaaattctgtcccattgcaggaggactgcggttcccattttccagcgcttcccagggaggttctttcagtgacagtccgagcctgaggatcccgccacttaaaactttccccagtccccagccctccatggcgcccccctcccataactaccatctggcctcattccattccaagcccattcatcattttatcaagtgcctgaaagtattccccttggtatgttttaactatagtgaccccagttggaagcaccctttgtagtcaa

SEQ ID NO: 8733 - DNA, 553 bp, Homo sapiens
gagtgtgaaagcgcggacgctcggggaggggtcgcactgaacaatcaggttcaggctttgacgagtcgtgcacccggaattgcggtcccagtggcccgagatctaccctggaagcaacagcgctcaggaaaggccgttgcgcctcgcgaaggaaacagagccgttgaccatggttgcaactggcagtttgagcagcaagaacccggccagcatttcagaattgctggactgtggctatcacccagagagcctgctaagtgattttgactactgggattatgttgttcctgaacccaacctcaacgaggtaatatttgaggaatcaacttgccagaatttggttaaaatgctggagaactgtctgtccaaatcaaagcaaactaaacttggttgctcaaaggtccttgtccctgagaaactgacccagagaattgctcaagatgtcctgcggctttcctcaacggagccctgcggcttgcgaggttgtgttatgcacgtgaacttggaaattgaaaatgtatgtaaaaagctggataggattgtgtgtgattct

SEQ ID NO: 8734 - DNA, 1108 bp, Homo sapiens
attcagcggcagatgccagaggaaactgcaaccagctcggggattcggaaccagatgcctgtgatggattattacaatttcctatcatgtaattgcttttctgtttgaccaaagctatcggcaggaccctcatcccccgttactttagcactgtgtttgaaggaggggtgaccgacctgtattacattctcaaacactcgaaagagtcataccacaactcatccatcacggtggactgcgaccagtgtaccatggtcacccagcacgggaagcccatgtttaccaaggtatgtacagaaggcagactgatcttggagttcacctttgatgatctcatgagaatcaaaacatggcactttaccattagacaataccgagagttagtcccgagaagcatcctagccatgcatgcacaagatcctcaggtcctggatcagctgtccaaaaacatcaccaggatggggctaacaaacttcaccctcaactacctcaggttgtgtgtaatattggagccaatgcaggaactgatgtcgagacataaaacttacaacctcagtccccgagactgcctgaagacctgcttgtttcagaagtggcagaggatggtggctccgccagcagaacccacaaggcaaccaacaaccaaacggagaaaaaggaaaaattccaccagcagcacttccaacagcagcgctgggaacaatgcaaacagcactggcagcaagaagaagaccacagctgcaaacctgagtctgtccagtcaggtacctattgctagcattgctcgttctccagtgtcaggctgcgcactaaggacataaactcgcgtggttgttacacatcaggaggcgatgtttatttcctgtagaaatcaaatatgcgtctcggcccccgacattgagacttgaccccgttgtacagtacacgagtgtgtctgtcctagattccccgactcctcccactgttattttaagctgagcttctctctcccaaggtttccctgtaataatgtcagctgctgttcacaggatgtgatggtggtaggagagccaactctgatgggaggtgagtttggggacgaggacgaaaggctaatcactagattaga

SEQ ID NO: 8735 - DNA, 682 bp, Homo sapiens
tctcccccacacccctcgtgtgtgtttgcgcgtgcacgcacgtgcacacacgtgcacacagcaggatgagaaggggaggaggtaggaggatacctgtgaaataaatatttgttttattttcagtgaaaaaattataggccaaaaattagaaaatagtgacagttataatctctttgtagatatttgcatttaaggtatcgtcttttctttcttttagaaaataggcgagtaaccaagtctgatccaaaccaacaccttacgattattcaagatcctgaatacagacggtttggctgtactgtagatatgaacattgcactaacgactttcataccacatgacaaggggccagcagcaattgaagaatgctgtaattggtttcataaaagaatggaggaattaaattcagagaagcatcgactcattaactatcatcaggaacaggcagttaattgccttttgggaaatgtgttttatgaacgactggctggccatggtccaaaactaggacctgtcactagaaagcatcctttagttaccaggtattttactttcccatttgaagagatagacttctccatggaagaatctatgattcatctgccaaataaagcttgttttctgatggcacacaatggatgggtaatgggagatgatcctcttcgaaactttgctgaaccgg

SEQ ID NO: 8736 - DNA, 9171 bp, Homo sapiens
cataatgcattagcgttatggccatgatgttgtcatgagttttgtatgggagaaaaaaaatcaatttatcacccatttattattttttaaccttcttcatgcaagcttattttctactaaaacagttttggaattattaaaagcattgctgatacttacttcagatattatgtctaggctctaagaatggttttgacatcctaaacagccatatgatttttaggaatctgaacagttcaaattgtaccctttaaggatgttttcaaaatgtaaaaaatatatatatatatatattccctaaaagaatattcctgtttattcttctagggaagcaaactgttcatgatgcttaggaagtcttttcagagaatttaaaacagattgcatattaccatcattgctttaacattccaccaattttactactagtaacctgatatacactgctttattttttcctctttttttccctctattttccttttgcctccccctccctttgctttgtaactcaatagaggtgccccaactcactgacctaagctttgttgatataaccgattcaagcatcggcctgaggtggaccccgctaaactcttccaccattattgggtaccgcatcacagtagttgcggcaggagaaggtatccctatttttgaagattttgtggactcctcagtaggatactacacagtcacagggctggagccgggcattgactatgatatcagcgttatcactctcattaatggcggcgagagtgcccctactacactgacacaacaaacgggtgaattttgaaaacttctgcgtttgagacatagatggtgttgcatgctgccaccagttactccggttaaatatggatgtttcatgggggaagtcagcaattggccaaagattcagatagggtggattggggggataaggaatcaaatgcatctgctaaactgattggagaaaaacacatgcaagtattcttcagtacactctcatttaaaccacaagtagatataaagctagagaaatacagatgtctgctctgttaaatataaaatagcaaatgttcattcaatttgaagacctagaatttttcgtcttaaataccaaacacgaataccaaattgcgtaagtaccaattaattataagaaatatatcaccaaaatgtaccatcatgatcttccttctaccctttgataaactctaccatgctccttctttgtagctaaaaacccatcaaaatttagggtagagtggatgggcattgttttgaggtaggagaaaagtaaacttgggagcattctaggttttgttgctgtcactaggtaaagaaacacctctttaaccacagtctggggacaagcatgcaacattttaaaggttctctgctgtgcatgggaaaagaaacatgctgagaaccaatttgcatgaacatgttcacttgtaagtagaattcactgaatggaactgtagctctagatatctcacatggggggaagtttaggaccctcttgtctttttgtctgtgtgcatgtatttctttgtaaagtactgctatgtttctctttgctgtgtggcaacttaagcctcttcggcctgggataaaataatctgcagtggtattaataatgtacataaagtcaacatatttgaaagtagattaaaattttttttaaatatatcaatgatggcaaaaaggttaaagggggcctaacagtactgtgtgtagtgttttatttttaacagtagtacactataacttaaaatagacttagattagactgtttgcatgattatgattctgtttcctttatgcatgaaatattgattttacctttccagctacttcgttagctttaattttaaaattacattaactgagtcttccttcttgttcgaaaccagctgttcctcctcccactgacctgcgattcaccaacattggtccagacaccatgcgtgtcacctgggctccacccccatccattgatttaaccaacttcctggtgcgttactcacctgtgaaaaatgaggaagatgttgcagagttgtcaatttctccttcagacaatgcagtggtcttaacaaatctcctgcctggtacagaatatgtagtgagtgtctccagtgtctacgaacaacatgagagcacacctcttagaggaagacagaaaacaggtcttgattccccaactggcattgacttttctgatattactgccaactcttttactgtgcactggattgctcctcgagccaccatcactggctacaggatccgccatcatcccgagcacttcagtgggagacctcgagaagatcgggtgccccactctcggaattccatcaccctcaccaacctcactccaggcacagagtatgtggtcagcatcgttgctcttaatggcagagaggaaagtcccttattgattggccaacaatcaacagtttctgatgttccgagggacctggaagttgttgctgcgacccccaccagcctactgatcagctgggatgctcctgctgtcacagtgagatattacaggatcacttacggagagacaggtacagcagtaaaatgctattttacactctgattaaatcagattctgttgtggataacctgaaagcccaacagtgaacaaagaattaaagaaactttggcaagtccattcaacggagcccttgttttttccaagaaaatacgtaagatatagatgatataatttgttctaaaacccaaataaaaagttgtttatatactacaactagagggggaacggcagagctgaggaaataaaaggattgtaaattcacaaacatattatcagtggtggaaataagtgatttttattttttcttctctttacttttctgtattttccaaattttatttaaaaggaatgtattctgttaaaagttttaaaaaggacacaatgcatgcaatcctgggttgagggcttaccttctcccacttctaatgctactctactactcagtgacattttaaagctgaaatgttaaaacagcgctaactgtaattttctctcaatgtttatacacttaccaaggtttgctacatgcataaatacccctttctgttcaagatagcgctctttaaaagggaataagcaagaagatgtgatttacatgctgctataaatgtggtaattcaattaatcagtaatacccaagtagctctaaacccctcacactctgaactaaccctttttcatacaggaggaaatagccctgtccaggagttcactgtgcctgggagcaagtctacagctaccatcagcggccttaaacctggagttgattataccatcactgtgtatgctgtcactggccgtggagacagccccgcaagcagcaagccaatttccattaattaccgaacagaaattgacaaaccatcccagatgcaagtgaccgatgttcaggacaacagcattagtgtcaagtggctgccttcaagttcccctgttactggttacagagtaaccaccactcccaaaaatggaccaggaccaacaaaaactaaaactgcaggtccagatcaaacagaaatgactattgaaggcttgcagcccacagtggagtatgtggttagtgtctatgctcagaatccaagcggagagagtcagcctctggttcagactgcagtaaccagtacgtaaccactgcttggtttccattttcaaagtcaaattttgttcttgggtgtctgaatgcccacgacatgtcttttgcaattacacatagggaaagtgaacttgttggttagtttatgtcttgagctgagccctttacgaacatcttttttccttctcagtgccaagcgaggaatttacagagaaagaagttgtgaaaccaccatagttagttgctgtgctttgaatttcttttgctcaaatggcctcagcgaaatcttatttgcctatagcaaatctacaaaaaattttcctagaccgtcttttctacaactggatggtaaagttgattgaagtgtgcctcatgtagctttatgtttggggcatttgaagggctatggctggaccagagtgtaatataaatgcttaatagagaggggaaaagaagagtgtaagaaccattatagggctgggctcacgcctgtaatcccagcattttgggaggctgaggcaggcggatcacgaggtcaggagttcgagaccagcctgaccaacatggtgaaaccccatctctactaaaaatacaaaaattagccagtcgcggtggcacgtgcctgtaatcccagctactcaggaggctgaggcagaagaatcacttggacccaggaggcagaagttgcagtgagccaagatcatgcctctgcaccccagcctaggtgatagagtgagactccatctcaaaaaaaaacaaaacaaaacaattataacaatttgaatctgacattgcaaatcagctttaccacttccaaggtatagaaaatccaggtctatgagactaacatcacattgtaaaaatcaaatcgtggtagaatatctttaaattaatataaatacatccccattgtggggacattttgcagggtatctgcttatctcacatacacctatgttttaataagtgatgcaacattgcatattttctaaaccaagaaaaattaagcaagtgtttaagtgatttttccttttgatagtgggttaattggacttcatcaaagaaaatggtatctgcaaaactgctttgcatgttataaaaatgcttatttcacaacttgcttttcacataacctcttaccattaatttgcctaacagacattgatcgccctaaaggactggcattcactgatgtggatgtcgattccatcaaaattgcttgggaaagcccacaggggcaagtttccaggtacagggtgacctactcgagccctgaggatggaatccatgagctattccctgcacctgatggtgaagaagacactgcagagctgcaaggcctcagaccgggttctgagtacacagtcagtgtggttgccttgcacgatgatatggagagccagcccctgattggaacccagtccacaggtatatggttaattgcaccaccaggtgcccatgggagcagcggctttatgccctactgaatgaattatgcttcactgggctattgattcccgtgtaagggtgaaaaagaattattaggaaagatcctctttaaagaggaatggtaagaaacaataaaacttaggtgatatttaaggaaacaagtctgattaaaagaaattttggagtatcctggcttatacacaagaccataaagcaagacatttgaagaggatactaaagttgtggattatttcctaagctctgactccctgtgattaccctcactatgtataaagaaaagaagtttggcattacagagcttacttataaaaaggaacccaaactcgggcatttcatagcagcatgattctgagcacacgtgggtaagacctttcttctctggttagatatcatatgctggtgtataattagcttaaatgattgtgatttagacacctaggaaataatcaatagggcaattgctttccataatactttatcttcttgtgctttatttctgaagcagagtagaatgctaaagatgtatcctagtgacagcataaaccctagaggtgacagtctgtattattgcttttcgcttctcttttctgcttctgttgggagccagttttcttcttacgccgcattacagagagaacgtcaaatttagcagccatatctgccatagggtccaaataaagagacaataaaaacattattctctcttttttggatggaatactgcgtgaaatggttatccatacaaagatactttatgtagaatagaaaaaggaggccgggtgcagtggctcacacatgtaatcctagtgctttgggaggctaagccgggagcactgattgaggccaggagttcatgatcagcctgggcaatgaagtgagaccccgtctctacaaaaaaatatgaaaaaattagcgaggtgtggtgacacatgcctgtagtcccagctactcaagaggctgaggtagaggatcacttgagcctacgagttcaaggctgcagtgagctatgataactccactgcactgccgcctggatgacacagagagaccgtttctaaattaattaattaacaattttaagaaagaaaaagggccattgcttatttttccatacaaaagtaaaataaatcataatggccaataagccaatgtaacttttttttttaagggaaagcaaaacttgtaaaacctaaaatctcttagagttttggcatttacccaaatgttttcagtgattctgagaattggtggatataaaacacatttctcagcaaacactttcttcattttgcatcccttactgtacgtactttcttgtactgaatctttgcttgaccagggaacccacctagcccaacaagaacaatccattctacttcttggaactcactttattttccttttcccccatttcctataagataacctctaaccaatgacaatctcgacagctattcctgcaccaactgacctgaagttcactcaggtcacacccacaagcctgagcgcccagtggacaccacccaatgttcagctcactggatatcgagtgcgggtgacccccaaggagaagaccggaccaatgaaagaaatcaaccttgctcctgacagctcatccgtggttgtatcaggacttatggtggccaccaaatatgaagtgagtgtctatgctcttaaggacactttgacaagcagaccagctcagggagttgtcaccactctggagaatgtcagcccaccaagaagggctcgtgtgacagatgctactgagaccaccatcaccattagctggagaaccaagactgagacgatcactggcttccaagttgatgccgttccagccaatggccagactccaatccagagaaccatcaagccagatgtcagaagctacaccatcacaggtttacaaccaggcactgactacaagatctacctgtacaccttgaatgacaatgctcggagctcccctgtggtcatcgacgcctccactgccattgatgcaccatccaacctgcgtttcctggccaccacacccaattccttgctggtatcatggcagccgccacgtgccaggattaccggctacatcatcaagtatgagaagcctgggtctcctcccagagaagtggtccctcggccccgccctggtgtcacagaggctactattactggcctggaaccgggaaccgaatatacaatttatgtcattgccctgaagaataatcagaagagcgagcccctgattggaaggaaaaagacagacgagcttccccaactggtaacccttccacaccccaatcttcatggaccagagatcttggatgttccttccacagttcaaaagacccctttcgtcacccaccctgggtatgacactggaaatggtattcagcttcctggcacttctggtcagcaacccagtgttgggcaacaaatgatctttgaggaacatggttttaggcggaccacaccgcccacaacggccacccccataaggcataggccaagaccatacccgccgaatgtaggacaagaagctctctctcagacaaccatctcatgggccccattccaggacacttctgagtacatcatttcatgtcatcctgttggcactgatgaagaacccttacagttcagggttcctggaacttctaccagtgccactctgacaggcctcaccagaggtgccacctacaacgtcatagtggaggcactgaaagaccagcagaggcataaggttcgggaagaggttgttaccgtgggcaactctgtcaacgaaggcttgaaccaacctacggatgactcgtgctttgacccctacacagtttcccattatgccgttggagatgagtgggaacgaatgtctgaatcaggctttaaactgttgtgccagtgcttaggctttggaagtggtcatttcagatgtgattcatctagatggtgccatgacaatggtgtgaactacaagattggagagaagtgggaccgtcagggagaaaatggccagatgatgagctgcacatgtcttgggaacggaaaaggagaattcaagtgtgaccctcatgaggcaacgtgttatgatgatgggaagacataccacgtaggagaacagtggcagaaggaatatctcggtgccatttgctcctgcacatgctttggaggccagcggggctggcgctgtgacaactgccgcagacctgggggtgaacccagtcccgaaggcactactggccagtcctacaaccagtattctcagagataccatcagagaacaaacactaatgttaattgcccaattgagtgcttcatgcctttagatgtacaggctgacagagaagattcccgagagtaaatcatctttccaatccagaggaacaagcatgtctctctgccaagatccatctaaactggagtgatgttagcagacccagcttagagttcttctttctttcttaagccctttgctctggaggaagttctccagcttcagctcaactcacagcttctccaagcatcaccctgggagtttcctgagggttttctcataaatgagggctgcacattgcctgttctgcttcgaagtattcaataccgctcagtattttaaatgaagtgattctaagatttggtttgggatcaataggaaagcatatgcagccaaccaagatgcaaatgttttgaaatgatatgaccaaaattttaagtaggaaagtcacccaaacacttctgctttcacttaagtgtctggcccgcaatactgtaggaacaagcatgatcttgttactgtgatattttaaatatccacagtactcactttttccaaatgatcctagtaattgcctagaaatatctttctcttacctgttatttatcaatttttcccagtatttttatacggaaaaaattgtattgaaaacacttagtatgcagttgataagaggaatttggtataattatggtgggtgattattttttatactgtatgtgccaaagctttactactgtggaaagacaactgttttaataaaagatttacattccacaa

SEQ ID NO: 8737 - DNA, 1720 bp, Homo sapiens
cccaggctcaaggcaaattataagtagggaaccaatttgagggaaagacatgtgaacagagttaaggtaccacgtcctgggagcgaccagcagccccacctgaagtccgcatgcaactctgacaagctcaggtgcttgttttaaggaaaggggctactagagtcttaccaacagcgagcccaggtgggagatgaaacaggtactccccaaaataggtcatccgagggaggaaaactgatggagagcacaatgtgctctgagcgtttttaatgtttttaagcttttaaatgatttcttcaaggccgagcagcagcagcaaaggtgtggcttaaaggattaagggggtttctgctgacacctagaatgaagttactctattactaatcaagccgagaggaggcccactatgcccccgtttatcatcctttcccagttcctttttgctggtcacaaaacgatgctcatcaatcccacctaaagcaggaggccaggagcccagcctcttgtagaaacagcgagggtataactgccctcccgttctgcccccaagacgaaggaggactctcggaagccaagaaaggtttaagaagtctttctggatagagagcagtgcccaggcaggaagcctttcgccggcagagcggggtccaaggacgagctggagaggacagaggcgcgatgggcctgctgcagggcctgctccgagtccggaagctgctgctggtcgtctgcgtcccgctcctgctgctgcctctgcccgtcctccaccccagcagcgaggcctcgtgtgcttacgtgctgatcgtgactgctgtgtactgggtgtcggaggcagtgcctctgggagctgcagccctggtgccggccttcctttacccgttcttcggagtcctccggtccaatgaggtggcggcggagtacttcaagaacaccacgctgctgctggtgggggtcatctgcgtggcggctgccgtggagaagtggaacctgcataagcgcattgctctgcgcatggtcttgatggccggagccaagccgggcatgtaagtcttatttgggatgccaggacatagggcatccttctagctcccagtgtgccaccaggacagtggtctcaggtcactgcgggatgtccacttcagctgtttttttaccaaagggtcgggctgacaccagagccataggacccgtccagggagagggcctgtgatcatggagtagagatttaaacctgtgaccttgctatcattatccaaagaatttacccattgacctaggctgcaagggcagcagcttacaacatataggggcccatcaggtaaaacaggatggaccaagagaaattgtttcccaacctgtttcctgtgtatcagggaacaggctggaccggaagtggctgtcttctcctttgtcactgaaggagacgggaatgtttcctcccatccaccctgagtttttgtcatcagttcagaccacagacccagttagagacactgcatttgactgtgatgcgggagggagtcccaccctcggggaatgtgttacggtgtcaaggttgagttttgtgttagcttcagcaatgttccatttggattcccctgcctgtaccttcccttttggaatatcctgctcacctccttctagtttacaactttcttgctgtattttatgtaagctgccctgactcctatgggagtcaacacgagtataaataaataat

SEQ ID NO: 8738 - DNA, 5396 bp, Homo sapiens
atggagccccgggctgccgcggcgggcgagccagagccgccggcggcgtcctcctccttccaggcccggctctggaagaacctgcagctgggggtgggcaggagcaagggcggcgggggcgggcgcgctgggggtccagagcgccgcactgcggacaccccgtcgccctccccgccacccccggtgggcacagggaatgcaccggccagggggagtggtgcaggcagcaggtggagcggcttcaagaagcggaagcaagtgctggaccgagtcttctcctcctcgcagcccaacctgtgctgctcgtcgccggagcccctggagcccggcggcgccggcagagccgagcaggggtccacgctacgccgccggatccgcgagcatttgctccccgccgtaaaggggcccgcggcggcctcgggagcagcgggagggacgcctcctggcggacgctcccccgactcagctccttcctcttcctccgcctcatcctccctgtcctcctcgccccagcctcccccgaggggggaccgcgcccgagatgagggtgcacggcgtcagggccccggggcgcacttgtgccaccagaagagctcctctctgccgggcaccgcctgcctggagcagctgctggagccgccgcctcctcccgcagagccggcgcggagtcccgcggagtctcgggccccggagacgggcgaggagcacggcagcagccagaaaataataaacactgctggaaccagtaatgcagaagtccccttggctgatcccggaatgtaccagctggacattacattaagaaggggtcaaagtttagctgctcgagatcgaggagggacgagtgatccatatgtgaagtttaaaatcggaggaaaagaagtttttagaagtaagataatacacaagaacctcaaccctgtgtgggaagaaaaagcttgtattctggttgatcatcttagggagccattgtatataaaggtatttgactatgattttggactacaggatgactttatgggctcagcctttctggatctgacacaattggagttaaacaggcccacagatgtgacccttactctgaaagatcctcattatcctgaccatgatcttggaatcattttgctctcagtcatccttacccctaaagaaggagagtccagggatgtgacaatgctaatgaggaagagttggaaaagatcaagtaaggaactttcagaaaatgaagtggttggatcttatttctctgtgaagtctctcttttggaggacgtgcggcaggccagctcttcctgtcctgggcttctgcagagcagagcttcagaatccttattgcaaaaatgtacaatttcagacccaaagtttacgcctatcagacctacacagaaaatcgcatctttggagaggaatagtcagcatcaccttgattgaagggagagacctcaaggccatggattccaacgggttgagcgatccctacgtgaagttccggcttgggcatcagaagtacaagagcaagattatgccaaaaacgttgaatcctcagtggagggaacaatttgattttcacctttatgaagaaagaggaggagtcattgatatcactgcatgggacaaagatgctgggaaaagggatgatttcattggcaggtgccaggtcgacctgtcagccctcagtagggaacagacgcacaagctggagttgcagctggaagagggtgagggacacctggtgctgctggtcactctgacagcatcagccacagtcagcatctctgacctgtctgtcaactccctggaggaccagaaggaacgagaggagatattaaagagatatagcccattgaggatatttcacaacctgaaagatgtgggatttctccaggtgaaagtcatcagagcggaagggttaatggctgccgacgtcactggaaaaagtgacccattttgtgtggtagaactgaacaacgatagactgctaacacatactgtctacaaaaatctcaatcctgagtggaataaagtcttcacgttcaacattaaagatatccattcagttcttgaagtgacagtttatgatgaagatcgggatcgaagtgctgactttctgggcaaagttgctataccattgctgtctattcaaaatggtgaacagaaagcctacgtcttgaaaaacaagcagctgacagggccaacaaagggggtcatctatcttgaaatagatgtgatttttaatgctgtgaaagccagcttacgaacattaatacccaaagaacagaagtacattgaagaggaaaacagactctctaaacagctgctactaagaaactttatcagaatgaaacgttgtgtcatggtgctggtaaatgctgcatactacgttaatagttgctttgattgggattcacccccaaggagtctcgctgcttttgtgctctttctctttgttgtctggaactttgagctctacatgataccactggttttgttgttactattgacatggaactacttcttgataatatcagggaaagataacaggcaacgtgatacagtagtggaggacatgctagaggacgaggaagaagaagatgacaaagatgacaaggacagtgaaaaaaagggatttataaataaaatctatgccatccaggaggtatgtgtcagtgtccagaacatcctagatgaagtggcttcctttggcgaaaggataaagaatactttcaactggactgtcccattcttaagctggctggccattgtagccctctgtgtgttcacagccatcctgtactgcattccgctgagatacattgtccttgtctggggcatcaataaatttacaaaaaagcttcggagtccatatgcaattgataacaatgaactacttgacttcctttccagagtcccttcagatgtacaagtggtgcaataccaagaactgaaaccagatccttctcatagcccatataaaagaaagaaaaacaatcttggctagccagctcccagcactgaggagaccagcatctgtttgggaagataaaagaaaaagccctcagcctcagcagcatttcctttctttctgctttttatttattttgcctttttatcatgatcgagagaatctgtaaatagtgtacaaaggcatatgtctttgaatatatacttctattgtacagactcaacttgataaaggttttgctactgctgtgtcaaaaccttgttagctgtggataataatataacacactgaaagaacaaatataagaatgataacactggaagatatattcttatctaattactagtggattaaatactcacctgtgctctgattaaatctacatcaattgtaaatgtcgatttgattttaaagtttttttttaatgcgactattttttatctgaaaagtaatccattacacttttctatgttttatacatttcaaaagggagggaaattccaaagcctgaataatggaatggatacatttcaatttaacatatattctggctttagatcccgacattcactcctgtgcaaattacttaggtatgacttaggctaattttaagctaataagtgaaggtacattcactccctcaagagaatcaatactcagaaggttacaaagttttctttatagaatttcaatcaatcattccatctaaaaccttaaaatctctacaggactacataacataaatactgccagtttataaacgattgcctatctgaatttttatacctaccactactttaatttatacagttagttagcaaattagcaacccagtaagtacagttatcaaaaatactaggaaactatatccatatcgcttttggtgtcagattgtatctgtgcatctaaaaatattttaataaatactcaagtgctctcagagaaaaaaaaaacctgctttctcattagattactgaaatgctttaattcatactatgattttgttattagtgtgaattttaatgtagagaattcagtgtgctaagtgatatgccagtgtttcactacattcatttattaaaaaaaatcattcttgattatgcatgaaaacctgttttgtaaaataaaataaactgcttgggggtggtggttgcctttatcaatgtttcactattatcatagaatctatacttaaaaattgcattcccaagactcttaaagtagtttttatatctcactccctggtatactaagggagcataactctggagaaaaaataatttggttggttgagaatgtcttacttccctgacttggtaggggactacactcagttgaaattgcagcagacaatgctttgcactactttattaataataaacttggatggggtaaaagtgggggttatactggaaaaactatagaaaagctaaaagaaatgtatatttcactctaaaggaagattctttaacaataaatgtaatctcattgaagctgatttttaaagtatttttattttagagataagttgttaaatactatttcttataatagaactattttgatctgtttatatactatgcttgaatgtcaattaaattccctttctacagaaaggctttgacctcaacatgctttatttaatgtatcatgtttaaaatgacatgcttctgtctgcataccatcactgtttgttgctaaaaacataatgttccatgaacatgatgttactacagaaagtttattgatgagataactgtttgaaataactttcaattataccttatgtgagacttttatgttctgtgctgacaatgtgtactcaaatgtctataagcctgatattctacaacctcagatgtatctagtggatagtaaccattaacagatgactaatttgtttcactgtatcaaatttcagatgtttagttcaatggtaatgctgactacacattcactgtattaaatacaaaagaaaataatctttcccacgtataatcagcactccttttttttttttttttggtggttcagagattgatgagggattgtgtgcatattcttaaaaactatatgtcacttggagaaaaacagatttggtttaaacaaataagacctttttcctgaaactctgactcttatatgaaaatacctctggaggggtgagcaaccaatgacattaacagaggaataagaactagcttgaggcacaaaagtgatattcagggaaatcttcattgcttttagaaactactacattcacaggctgaaaacagaatatgtatagttaaaattttaactatttatttctttccccttctcacatagctgcaattctgtcttgagagctgcctgacttgccttcattttgagatctgtgatgtaaatatttcttaagagactgaatgtcactcaaacatctacttggactg

SEQ ID NO: 8739 - DNA, 1589 bp, Homo sapiens
gctggaggttcgctagccgaagcggctgcatctggcgccgcgtctgccccgcgtgctcggagcggattctgcccgccgtccccggagccctcggcgccccgctgagcccgcgatcacttcctccctgtgaccaaccggcgctgcaggttagagcctggcaatgccgtttgggtgtgtgactctgggcgacaagaagaactataaccagccatcggaggtgactgacagatatgatttgggacaggtcatcaagactgaggagttttgtgaaatcttccgggccaaggacaagacgacaggcaagctgcacacctgcaagaagttccagaagcgggacggccgcaagggtgaagcatcccaacatcctacagctggtggatgtgtttgtgacccgcaaggagtactttatcttcctggagctggccacggggagggaggtgtttgactggatcctggaccagggctactactcggagcgagacacaagcaacgtggtacggcaagtcctggaggccgtggcctatttgcactcactcaagatcgtgcacaggaatctcaagctggagaacctggtttactacaaccggctgaagaactcgaagattgtcatcagtgacttccatctggctaagctagaaaatggcctcatcaaggagccctgtgggacccccgagtatctggccccagaggtggtaggccggcagcggtatggacgccctgtggactgctgggccattggagtcatcatgtacatcctgctttcaggcaatccacctttctatgaggaggtggaagaagatgattatgagaaccatgataagaatctcttccgcaagatcctggctggtgactatgagtttgactctccatattgggatgatatttcgcaggcagccaaagacctggtcacaaggctgatggaggtggagcaagaccagcggatcactgcagaagaggccatctcccatgagtggatttctggcaatgctgcttctgataagaacatcaaggatggtgtctgtgcccagattgaaaagaactttgccagggccaagtggaagaaggctgtccgagtgaccaccctcatgaaacggctccgggcaccagagcagtccagcacggctgcagcccagtcggcctcagccacagacactgccacccccggggctgcagaccgtagtgccaccccagccacagatggaagtgccaccccagccactgatggcagtgtcaccccagccaccgatggaagcatcactccagccactgatgggagtgtcaccccagccactgacaggagcgctactccagccactgatgggagagccacaccagccacagaagagagcactgtgcccaccacccaaagcagtgccatgctggccaccaaggcagctgccacccctgagccggctatggcccagccggacagcacagccccagagggcgccacaggccaggctccaccctctagtaaaggggaagaggctgctggttatgcccaggagtctcaaagggaggaggccagctgagtaggcagcctggtgagggggggcaggggatgggcaggagggtgggagagtggatga

SEQ ID NO: 8740 - DNA, 799 bp, Homo sapiens; identical to SEQ ID NO: 8247

SEQ ID NO: 8741 - DNA, 585 bp, Homo sapiens
aacataagtgggaagctatttattcccttgttgctgaggttggttgagatcgtactgagaagcactccacaatgccagactcacctgtggatgtgaagacgcaatctaggctgactcctccaacaatgccacctcccccaactactcaaggagctccaagaaccagttcatttacaccgacaacgttaactaatggcacgagccattctcctacagccttgaatggcgccccctcaccacccaatggcttcagcaatgggccttcctcttcttcctcctcctctctggctaatcaacagctgcccccagcctgtggtgccaggcaactcagcaagctgaaaaggttccttactaccctgcagcagtttggcaatgacatttcacccgagataggagaaagagttcgcaccctcgttctgggactagtgaactccactttgacaattgaagaatttcattccaaactgcaagaagctactaacttcccactgagaccttttgtcatcccatttttgaaggccaacttgcccctgctgcagcgtgagctcctccactgcgcaagactggccaaacagaaccctgccc

SEQ ID NO: 8742 - DNA, 8372 bp, Homo sapiens
cgctggaggagggaggcggaaggacagcgctgcgccaccacccggaggagggagcgcggtagctgcaggcaggggagggagaggaaagaaaaggaaggacggctcccagacagagagtgggagaaaccggggagcagcgggagcagcaggtccggggggagctgttccgctgcgctgccctcgttattcacacggacgctgcggagcttcccagggctgcttccctgtccccctgggtggaggctgccgtctaaacctgactccagagtttaagatgcaatggccagaagacatgaacgtgtcactagaaggatgtggacatgggctccgggactgttgatgatgactgtggtgttttggggtcatcaggggaatggacaaggccaaggatcgcgtcttcgccaggaggactttcccccgcggattgtggagcatccttccgatgtcatcgtctctaagggcgagcccacgactctgaactgcaaggcggagggccggccaacgcccaccattgagtggtacaaagatggggagcgagtggagactgacaaggacgatccccggtcccacaggatgcttctgcccagcggatccttattcttcttgcgcatcgtgcacgggcgcaggagtaaacctgatgaaggaagctacgtttgtgttgcgaggaactatcttggtgaagcagtgagtcgaaatgcgtctctggaagtggcattgttacgagatgacttccgacaaaaccccacagatgttgtagtggcagctggagagcctgcaatcctggagtgccagcctccccggggacacccagaacccaccatctactggaaaaaagacaaagttcgaattgatgacaaggaagaaagaataagtatccgtggtggaaaactgatgatctccaataccaggaaaagtgatgcagggatgtatacttgtgttggtaccaatatggtgggagaaagggacagtgacccagcagagctgactgtctttgaacgacccacatttctcaggaggccaattaaccaggtggtactggaggaagaagctgtagaatttcgttgtcaagtccaaggagatcctcaaccaactgtgaggtggaaaaaggatgatgcagacttgccaagaggaaggtatgacatcaaagacgattacacactaagaattaaaaagaccatgagtacagatgaaggcacctatatgtgtattgctgagaatcgggttggaaaaatggaagcctctgctacactcaccgtccgagctcccccacagtttgtggttcggccaagagatcagattgttgctcaaggtcgaacagtgacatttccctgtgaaactaaaggaaacccacagccagctgttttttggcagaaagaaggcagccagaacctacttttcccaaaccaaccccagcagcccaacagtagatgctcagtgtcaccaactggagacctcacaatcaccaacattcaacgttccgacgcgggttactacatctgccaggctttaactgtggcaggaagcattttagcaaaagctcaactggaggttactgatgttttgacagatagacctccacctataattctacaaggcccagccaaccaaacgctggcagtggatggtacagcgttactgaaatgtaaagccactggtgatcctcttcctgtaattagctggttaaaggagggatttacttttccgggtagagatccaagagcaacaattcaagagcaaggcacactgcagattaagaatttacggatttctgatactggcacttatacttgtgtggctacaagttcaagtggagagacttcctggagtgcagtgctggatgtgacagagtctggagcaacaatcagtaaaaactatgatttaagtgacctgccagggccaccatccaaaccgcaggtcactgatgttactaagaacagtgtcaccttgtcctggcagccaggtacccctggaacccttccagcaagtgcatatatcattgaggctttcagccaatcagtgagcaacagctggcagaccgtggcaaaccatgtaaagaccaccctctatactgtaagaggactgcggcccaatacaatctacttattcatggtcagagcgatcaacccccaaggtctcagtgacccaagtcccatgtcagatcctgtgcgcacacaagatatcagcccaccagcacaaggagtggaccacaggcaagtgcagaaagagctaggagatgtccttgtccgtcttcataatccagttgtgctgactcccaccacggttcaggtcacatggacggttgatcgccaaccccagtttatccaaggctaccgagtgatgtatcgtcagacttcaggtctgcaggcgacatcttcgtggcagaatttagatgccaaagtcccgactgaacgaagtgctgtcttagtcaacctgaaaaagggggtgacttatgaaattaaagtacggccatattttaatgagttccaaggaatggatagtgaatctaaaacggttcgtactactgaagaagccccaagtgccccaccacagtctgtcactgtactgacagttggaagctacaatagcacaagtattagtgtttcctgggatcctcctcctccagatcaccagaatggaattatccaagaatacaagatctggtgtctaggaaatgaaacgcgattccatatcaacaaaactgtggatgcagccattcggtccgtaataattggtggattattcccaggtattcaataccgggtagaggttgcagctagtaccagtgcaggggttggagtaaagagtgagccacagccaataataatcgggagacgcaatgaagttgtcattactgaaaacaataacagcataactgagcaaatcactgatgtggtgaagcaaccagcctttatagctggtattggtggtgcctgctgggtaattctgatgggttttagcatatggttgtattggcgaagaaagaagaggaagggactcagtaattatgctgttacgtttcaaagaggagatggaggactaatgagcaatggaagccgtccaggtcttctcaatgctggtgatcccagctatccatggcttgctgattcttggccagccacgagcttgccagtaaataatagcaacagtggcccaaatgagattggaaattttggccgtggagatgtgctgccaccagttccaggccaaggggataaaacagcaacgatgctctcagatggagccatttatagtagcattgacttcactaccaaaaccagttacaacagttccagccaaataacacaggctaccccatatgccacgacacagatcttgcattccaacagcatacatgaattggctgtcgatctgcctgatccacaatggaaaagctcaattcagcaaaaaacagatctgatgggatttggttattctctacctgatcagaacaaaggtaacaatggtgggaaaggtggaaaaaagaagaaaaataaaaactcttctaaaccacagaaaaacaatggatccacttgggccaatgtccctctacctccccccccagtccagccccttcctggcacggagctggaacactatgcagtggaacaacaagaaaatggctatgacagtgatagctggtgcccaccattgccagtacaaacttacttacaccaaggtctggaagatgaactggaagaagatgatgatagggtcccaacacctcctgttcgaggcgtggcttcttctcctgctatctcctttggacagcagtccactgcaactcttactccatccccacgggaagagatgcaacccatgctgcaggctcacctggatgagttgacaagagcctatcagtttgatatagcaaaacaaacatggcacattcaaagcaataatcaacctccacagcctccagttccaccgttaggttatgtgtctggagccttgatttctgatttggaaacggatgttgcagatgatgatgccgacgacgaagaggaagctttagaaatccccaggcccctgagagcactggaccagactcctggatccagcatggacaatctagacagctctgtgacaggaaaagcctttacctcctctcaaagacctcgacctaccagcccattttctactgacagtaacaccagtgcagccctgagtcaaagtcagaggcctcggcccactaaaaaacacaagggagggcggatggaccaacaaccagcattgcctcatcgaagggaaggaatgacagatgaggaggccttggtgccctatagcaagcccagtttcccatctccaggtggccacagctcatcaggaacagcttcttctaagggatccactggacctaggaaaaccgaggtgttgagagcaggccaccagcgcaatgccagcgaccttcttgacataggatatatgggctccaacagtcaaggacagtttacaggtgaattatagtaaatgagaggagacatacaaagctgctctgaaggaccatcaggtccggactcatggaagtgatgactctaaacagtgcaatgaacaatttatttatgtactattaaaagaactgtaaatgcaatgtaaagacacacagccacacatatcccacagatattttcattgtgttcttctcttaagtacaccacccaccttaactctttcttgtcaggagtatataaaaaagaaagaaaacaaaactcgccctacaggaagaaaaggattctcctctgtatataatttcttttgtgcattgctatgcaagctcactctttttagctctgctcatattattgtctgttcttattggtctgttgtactatatgtgaattaataggctgtggtgccatatattaacttttaattgtgtaacttttatgtttaaattttgcactgcaattttatttggtgataagcacaaatctctactcctcatgacatgaagaaaaagactgaatgtgaagggagtttctgtactgtaagctagattggataatgatggctgtaacaaatcatgttagatggttttcagttggggtgtagaaataggaagatgcaaaggaacaatggtgttggcaaagtcttctttgaatatcagggactgagtcaataaaaaaaatagtagaaaggtggcttttactattgacaaaagccggggtcaaaaaaagtagtttaagtcttaagactgaatatgcattaaagtatgcaggtagcaaagatgtaataaatttgcttaaaaaaagaaattaaagttttatttagaatcaattttacctgtcattgtaattgacccatctgagaattacaataagcaagaggaaattaaggtgttttgcaagagctgtatttatattacagttttttaaaaacattttctgaattatcgtaattaagctctccaactcgttaagtcagaatataatatgaagttccccaaggaaacgaacaaaatgaactctagaatatctagcaaatagttaaagaagcaatttattattagggcatactcgggctgtttccaaatataaactctattgcaatatcttatttcatctttctaatacatgtacagtgcacactagaggatagagctgcatcacttaaattcatgacttaaaaaataatacagtttatatacaacttgttttttatttgattaagaagtgaagtttacgccacccaatgtatagccaaattgtacgtgcttaaaaaacagtgccgagagtatgttcagttcgcagtaagtagatttattggaataaatattctatggtacattctcagaaattggcttccaactaaaatacgtttgacccattttgaataaggaaattgaaaagaaaaatttaaaaggagaaaaaaatgcatgtttataaactttttaaataaaaccagaccttgtaagtggacattaataattgtcctgcctcatttgttttcacgactttgacaacaagaagttcctgaacattagtcatgtatgctcagaataaatgtgactttgaaatatatgttagctactgtacatgtatagtcagtcaagtagaagaggaccttcctgaaattcccacttgtgacattttcccatgggtttcctacacaatcttaaattttatttctgtctatactttctcaaatttttcctatgataagttcagttgttggtactcttctaaaaatattcaacgtgattaggatcagttctaaaatacgggacccctttgagtgacaattcgcactccatgcattattggctcagtagccaatttttgtcacgtcgttataacaaggagatgacataattaaacatttccatcctttctattccctgagactgcatcagcacaggcaagtatagaatgtaatgttcttcatgggccccaccagctttttggtgccatgtaatttatttcttcgctgaagagaaaaagaattctgagacacagttattaaaccctttatcaactttctaccatcagtgcctgaattctaatgcagtgtgatttctctgggacaaagagactgaggaagatgaaaagtttcttcaaagagtgaatacatacttattcacaactctaggatgtgaggactttaaatatctctttatgaagttccctgcctaacctctttctatttaaaggcaaacaaatttcgaagaggttttgtgttccctctttatgtttctctatgacccagtttagtctaaaaccttagttcattacatatacaacacatagcctttgatccctggtaactggcaggtgttggtgattaataaaccaaggcttcaaagtgaagtatgtgtgtgcagatgacttttggaataacgtgggcatagcatcataccttcctgattgtcttcagcatataaaaattaactgttgtagttaaaattatgtcagtgcagagcttgtggttacttggaatgttctttcagaatagtccatgttgcctattaaacctagttttaaacacattgggcagtcaatttatgcacccaaaatatcaccctcaggtagattgagggcaagataaaatgctgtatgtagctatacaaaggaattcagaaacattactggaaagcaaagcctttgtcagcttgctactgacaaagtagtaaaaagctactaatcagtgttgagtcagatgtcaacagaaaaatacaaatacctatgagagccacagcagtttctcgtttcatagccgattcaatgaatatgattagaaattcactgagctcactcttgcaggtttaaatggaggcctgcataaggactgcaagaggaaatctgggtgggagagaatgtaatctgatcttgcactcataggcaatgctgcaatgcaatcatgtccaatacaagcacagcttcattcataacaggaaacgtcttctttgggaaaatagctctattggtgcccaaactcaggtatgccagtgtatgcaggtggagtcgccctacccctcttccaaacatgtcctgtgagatttttaaaataagatgggatagtacaggggcatgaaaagaattgattccttcacaggatttgaatccagttcaagggagaatgtagaaaattcaaaaccaacatataaggtatcacacaaccaagaaaagtaaaaccattgcaagtttacttgcgttgagtacaaaacagatttaatggtgttctatgtcatagtttaatgctctgggtatttaaatatgttttcaacaggatttgagttgaaagtttgtaatgtgctttgatggaacacctctcaatttctattcaataaacttatgtaattgtccattgacaatataatgataacagtaccattgaactctaaactgtggtttatcttcactactgggaagcaactgtgcatcagtattaaagatatgcagaaacataatattcactaatttgttcatctgcttctgtatattgtttatggaattacatggcaagaactgttctaaagcaacatgtctttccacattattttagaggtgaaattacttttgttttgcttctctataatgtgtacttcaaatgaaacaccatacttttttctaaaaaaagatgttcaatttactaatttttttaaatctcataatttaaaaagcatttgttgtgattttaaagtgttgcaagaaaagggattttgtggccgtgggtagactttttatactttgttttatagatggattttttttaactgtagtttgtttaagtcaccaagcagcatccaaaatcttaatgtgtttcatttgatgttgttagatcagagaagaaattggcataaaatcggttaatagtattgtcaaagaattgtgtattgtgtactcactgggaaaaaataaaatatattcacatttcaa

SEQ ID NO: 8743 - DNA, 522 bp, Homo sapiens
tcactctgacattcatcacttcaggcttctgtgtgtggcatcgttcattgggaatgcagtaaggatggcctttactgaccagcctacttcagttctacctggataagtcttttctttttcttttttctcagtaagtgctataaaagaactccctggggtgaagaagtatgaagtggtttatcctataagacttcatccactgcataaaagagaggccaaagagccagagcaacaggaacaatttgaaactgaattaaagtataaaatgacaattaatggaaaaattgcagtgctttatttgaaaaaaaacaagaacctccttgcaccaggctacacggaaacatattataattccactggaaaggagatcaccacaagcccacaaattatggtataacggagtctcttcaattctttaattagggttttacccacagacctaaaggtagtgtccttgccaggcaaataatagaagtgaaactgcatttgtaacattagtgcttttttcagcagtagccatta

SEQ ID NO: 8744 - DNA, 558 bp, Homo sapiens
tagtcctgatgccactttaatactgcagggtatttctgtgacttccgccagtcacagagcttgagataaatggatggtttttgcttgtttgtgatttgccttttgaagcatgtttatgattccatttgtgcgtttgtcagaaatactgctttgagccaagattaatagtgatttatttgttttgtaaggggctgcagtcttgcagtgatatctggagtactctatggatctacatttgtgccaatcatctacatcaaggaccacagcaaaagaaatgatagtatatatgcaggggcaagccaatatgatttagactatgtgtttgcgcacttcagtggcatctttcttacaagtactgtctactttctggcctactgcatagccatgaaaaatagtcctaaactatatcctgaagcagtcctaccaggattcctgtcaggagtactttgggctatagctacctgctgttggttcatagcaaatcactctctgagtgctgtggtcagttttccaataatcactgctggtccaggatttatagctgcaatgtggggtatc

SEQ ID NO: 8745 - DNA, 627 bp, Homo sapiens
agccaacctagggcctggggtctgatggttccaggggcctgagagtcccagaggaaagctgtacccggttctaccatccggaaaaggaggatggaaagctgaacaagctctgccgtgatgaactgtgccgctgtgctgagggtgagttccctggagccgggaacagagaattgcttcatacaaaagtcggatgacaaggtcaccctggaagaacggctggacaaggcctgtgagccaggagtggactatgtgtacaagacccgactggtcaaggttcagctgtccaatgactttgacgagtacatcatggccattgagcagaccatcaagtcaggctcggatgaggtgcaggttggacagcagcgcacgttcatcagccccatcaagtgcagagaagccctgaagctggaggagaagaaacactacctcatgtggggtctctcctccgatttctggggagagaagcccaacctcagctacatcatcgggaaggacacttgggtggagcactggcccgaggaggacgaatgccaagacgaagagaaccagaaacaatgccaggacctcggcgccttcaccgagagcatggttgtctttgggtgccccaactgaccacacccccattcc

SEQ ID NO: 8746 - DNA, 569 bp, Homo sapiens
tatttcagaactctgatttattgtttatactgcttgtaagcagatttggtatgtcagaccataataaagaacctggaatgcaactagacgacagattattactgactacattccagtggcaagcttatcatttggattttcacctttgcctaaattatcgagcaaatgacacagttcctccaactatcccatacaaccaatcatacgaccagaacacaggaggatcctacaacagctcagaccggggcagtagtacatctgggagtcaggggcacaagaaaggggcaagaacacccaaggtaccaaaacagggtggcatgaactgggcagacctgcttcctcctcccccagcacatcctcctccacacagcaatagcgaagagtacaacatttctgtagatgaaagctatgaccaagaaatgccatgtcccgtgccaccagcaaggatgtatttgcaacaagatgaattagaagaggaggaagatgaacgaggccccactccccctgttcggggagcagcttcttctccagctgccgtgtcctatagccatcagtccactgccactctg

SEQ ID NO: 8747 - DNA, 478 bp, Homo sapiens
agaggcgccaggagctctctcgccccattccctgcgggcacaggtggggccgttaggggttgaccttggaagtaaaacgccttcaggaattaggtagaaaaggaccatccgttcatccaagatcatctcacctcccatgaagggaacggtcttctaaatgcaggttacaataccaggtgggccaaaattatccttccaagattaatcaggaaaggaaacagtttggacatcccagtagcagttacaattttctttggggccaatgacagtgcactaaaagatgagaatcccaagcagcacattcccctggaggagtacgctgcgaacctaaagagcatggtgcagtacctgaagtccgtggacatccctgagaatcgagtcattctcatcacgccgaccccactttgtgaaacagcctgggaagaacagtgcatcatacaaggttgcaaactaaatcgcctgaactctgttgttggtg

SEQ ID NO: 8748 - DNA, 5002 bp, Homo sapiens
gagcaccgcgcgcggccctgcccccggcacggcccccaggtgcgctccttctccggctgcttgtagcactggtctcactgtccccgccgtcagccaccggttccttatccgtctcattccccattgtggcttggctgagccggtcgccaggcctcgctgtcctcctttgccttcctctctcctcagcggccgtactttgcgccgtacctcacctggcctgcaggtgagcagcagcgcagcacccctgcccggcgagcttaacttgcccagcccggcccctgccggagtggcaccggcacctctccaagacgccctcttccctgcaggatgaagaaccccatgctggaggtggtgtctttactactggagaagctgctcctcatctccaacttcacgctctttagttcgggcgccgcgggcgaagacaaagggaggaacagtttttatgaaaccagctctttccaccgaggcgacgtgctggaggtgccccggacccacctgacccactatggcatctacctaggagacaaccgtgttgcccacatgatgcccgacatcctgttggccctgacagacgacatggggcgcacgcagaaggtggtctccaacaagcgtctcatcctgggcgttattgtcaaagtggccagcatccgcgtggacacagtggaggacttcgcctacggagctaacatcctggtcaatcacctggacgagtccctccagaaaaaggcactgctcaacgaggaggtggcgcggagggctgaaaagctgctgggctttaccccctacagcctgctgtggaacaactgcgagcacttcgtgacctactgcagatatggcaccccgatcagtccccagtccgacaagttttgtgagactgtgaagataattattcgtgatcagagaagtgttcttgcttcagcagtcttgggattggcgtctatagtctgtacgggcttggtatcatacactacccttcctgcaatttttattccattcttcctatggatggctggctaacttcatacccccatgtcagtgtgtgtattctgtatgtaaatatgtttatatttatagagcatcaatcaatataagcattattgagaaaaatgtgacccgtaacactgtgttctggataaaaatgtgattaggaatcacgcaaagtgcttactgtgtaagcccaagaacaaaggctttctgaatcttctcaggcagttcagatttaaagcaccatccaaaccttggaaatacgacagggtgtggtagaattcagcaatatgagaaaaccagcccctaaaatgatagccacaagagattaattgtgtttttttttctcctgtaatccttgtactgttcggctgaatttgaagattggaagacttatattgagaccagtaactttactgtaaatttactttgtttcattgaaaaaacaaattgataaacatattaaactggaagaattttctttattcaaatgaaaacatgtttgatgactggtcaaaaaataagctcataatctatttttttcatgtagtatataagtcaagaatgttttattgtcattatgtgaaaccaatattggcaaatagtactttaatgatgaagtaaatgaccagaaattatagaaatctgtgttttcctgtaaaaatagcactatagtatcacttgaacaatttgatttggctttacttactaggaagcctggaattcattatttttttccttttatgtgccactgtggctactttaaatcactctgagaggtaaatggatataggattgaagttatgtgggtatttggcatgtgtgtgtgaaataaatatgtagatagtcacatatacacagactgagagataaattgttcttgattgctttattatcatcatactagtgtgttcattatagagtatctgtagaggtgaatgtaaaagtaagtccaatctattttcttatgtcattgaatttgtagtgttaacttgcatatatgttattggatgggttgtcttttaaagcatttactaatgtactctgaaatttttaaaagccttcagatttgttttctagtcacttttttccatatcatttctaattatagtttatatccttaaaagaaggatgccacagtagtatgtaaaacccaaacaagtagaacccaagcaaataaaattatttaaaataattttaaagtggcttagtactgccagtcatgtaaattgattctgctgagggtcttataagaattgagatataacaatggtaaaacaagcattcaagcacttttacaaaattaccaaattcttaaaatgaagccacagctagacttgcatttcaggtattaaaattgctttcttaactgtcaagaatcacaaaataacaaatcatattatgagtgaatatggggagggcggggccaatcagtcaatgataatctgaacaaattttaagagcagattttagattaataatgttttatcaccactaatttgcccacaacaaactcagtatttaatttttcaaattaaatattaaattatttaagtattttaaataattaaaacattaaatggcaacaccatagaatataggtgttctctggacctattctaaccacttaaaattatcttaagtatgcatacataaaagcaaccactatgagaactaccgtgttagtggtttttcacttactgtatattacccttgtaggaatagtttaaggaaattcatttcttaaaaatatagtgtcctcaaataattaatttttttgcaaactttagttattacaggcagcaaaaaccactgtctgaaactaaatctgtgttcaaagatgaagacccctcattaaaagccaaggacgttcttaagattggaactgacataattagtcttgacttacttcattaaagcaagattcaattccttgttcatttgagtgttcattatatgccaggcattgaccagttgcaattttatggtccagaattaatattattattcgtaaactagctataatagagtatatacagtgctgtgggaatacaggggaagaagcaattaaatctgctagaagggtaagagaaatctgtatgcaggaggcaatgctagcattaagccaagaaatagtgtgaggtgatcttatcacactgatgtgttcaactgtttatgggaaaaggaaactaggatggttttatttgtgaaatgttctacaacgctagaactgttgaacttcttgggagaaaaggagaatctttgttttgttgtgctgagtttgattagttgcttaaccaagtagaaagaaaagcacatcttcctgatcacagttataaaagaaaccctgaggccgggcgcggtggctcaagcctgtaaccccagcactttgggaggccaaggagggaggatcacaaggtcaggagatcgagaccatcctggctaacacggtgaaaccccatctctactaaaaatacaaaattagctgggcgtggtggccggcgcctgtagtcccagctactcatgaggttgaggcaggagaatggcgtgaaccgaggaggcggagcttgcagtgagtggaaattgcgccactgcactccagcctgggcaacaaagtgagactccatctcaaaaaaaaaaaaaaaaaaaaaaaaaaaaaaagaagaagaaaccctgagccattaatgtgtctcgtaacttgaggaagttcatgaattctctgggcttcatccattaagattcatccttatgctcctgcaagtttcttatatttatgtatttctattctgatttctgaaatgataacctagtagtgtctgatgaagttttttcatgcttattttattctttgtcacagatgaaagaagaataggactaattggggctaagatgaattaatgtaagtgtcagatactaggcaggtgttagggatgaaatgatgaatgaggcatggacctgttcctcagagtttatggcccagtagacataattgtattaggactttctgcagttgacatttgcataaagctgactgactgaaggaacagaaagtgagacagacagatatgaccaaatttatacaaaccatgtaccaacacttgaaagatgggtggatattttccaggaaacagattttgggcaggacattccatgcactggaaatagcatgaacaaatgcatgaaaattgcctacaacatgcctggcacatagctgtgaggtaccctatgagttgttgacttgaaaacatggaactgcacagggcattcaggcaagtgcaagtggttcaggggccagcgcagagcagagtgctgagtaaagatgtcagaaaaggaaagcaatggtctggtacaagtcttgtatagaacaagaagtttagacttttgaacaggcaatcgagatttggggttcagaaagataaatcccaaaagtatggagaacaaaggaactcattttaaaggactagctaagatgctcaatctctaaaaaaaaaaggatctgtattcgtgagagtagagagaaaggttgtttaggaagagtcaacagactttagcaaaatccttttatttgattcatgcataactcctgatggagtgtcaaggaagactcattcacttttctttcctgccagaaagttggttcttgcaaaatagattaacttgatgactatgtgtatattggatactcctaattttagctctgttagatatgtttctttctaaggacaagcaactatgtatagacttgttgtttgaattttttttcagtatatatatgtttcttgtttttctatttttctacttcatactgttaatgtcaaatatcaaaaatgttttccagcaatatcaagttatggcaatggcaaaagtccttgttgtagatgagaagcatataagaaatggttgccaatctttgttttgtatgatctatttagagttttaaccaacctagatctgtcagctaagctaattttatatttggtatacatgcatgtcaaataaagttaattttacatac

SEQ ID NO: 8749 - DNA, 650 bp, Homo sapiens
agacacaaggagaggcttggagagagcagacgccttctggattcaagaagacgaggtgagctgaggtacctggctttagtgaagaccctgtgggggcttcctggctgcggcttcgacgtgcctgactccacacgcccctaaggctcacctgttactcggcctcccagaaagatggataggagaaatgactacggatatagggtgcctctatttcagtttgttcatttcttctataaaagttttactttgagctagtccctgtgttcagataggctgtggaagatgctgagaagaaggtgatatagtttctgctccctagcagttcacagattgtccaagcatctgaatggggatgagagaagtggcagtaattacaggcggatcccatggggccggaggcctgcaccaccgcgagatgtggccattttacaagaaagggctaataagttggtgaaatacctgttggttaaggaccagacaaagatccccatcaaacgctcagacatgctgagggatgtcatccaagaatatgatgaatatttcccagaaatcattgaacgagcaagctacactctggagaagatgtttcgagtcaatctgaaagaaattgataagcaaagtagcttgtatattctcatcagcactcagga

SEQ ID NO: 8750 - DNA, 505 bp, Homo sapiens; identical to SEQ ID NO: 8411

SEQ ID NO: 8751 - DNA, 4968 bp, Homo sapiens
agagagataccgagaatgttcctagagggtctgcgcagctagagagagctcaccaagagaagttggcgcaaagtagctagccagagcctggggactgtgttaggatgaaagtcctggacagacttatcacagagagagaagaaacgcaatcactatgcagccacagaatgtccaggggctcagcaaagtcagtgaggaaccttcaacatcgagtgacgagagggcctcattgatcaagaaagagatccatgggtccctgccacacgtggcggagccctctgtgccgtaccgcgggacggtgtttgccatggaccccaggaatggttacatggagccccactaccaccctcctcatcttttccctgccttccatcctcctgtaccaattgatgccagacatcatgagggccgttaccattacgatccatctccgattcctccattgcatatgacttccgccttatctagtagccctacgtatccggacctgcccttcattaggatctccccacaccggaaccccactgctgcttccgagtctcccttcagccctccacatccctacattaatccctacatggactatatccgctccttgcacagcagcccatcgctctccatgatctcagcaacccgtgggctgagccctacagatgcgccccatgcaggagtcagcccagcagaatactatcatcagatggccctgctaactggccagcgcagcccctatgcagacattattccctcagctgccaccgccggcacgggggccatccacatggaatatcttcatgctatggatagcaccagattctccagccccaggctgtcagccaggccgagccgaaaacgtacactgtccatatcaccactctccgatcatagctttgaccttcagaccatgataaggacgtctcccaactccttggtcacgattctcaataattcccgtagcagctcttcagcaagtggctcctatggtcacttatctgcaagtgcaatcagccctgccttgagcttcacctactcttccgcgcccgtctctctccacatgcatcagcagatcctaagccgacaacagagcttaggttcagcctttggacacagccctccactcatccaccctgccccaacttttccaacacagaggcctattccagggatccctacggttctgaaccccgtccaggtcagctccggcccttctgagtcctcacagaacaagcccacgagtgagtctgcagtgagcagcactggtgacccgatgcacaacaagaggtccaagatcaaacccgatgaagacctccccagcccaggggctcgggggcagcaggaacagcccgaaggaacaacccttgtcaaggaggaaggggacaaagatgaaagcaaacaggagcctgaagtcatctatgagacaaactgccactgggaaggctgcgcgagggagttcgacacccaagagcagcttgtgcaccatataaataacgaccatattcatggagagaagaaggagttcgtgtgcaggtggctggactgctcaagagagcagaaacccttcaaagcccagtatatgttggtagtgcatatgagaagacacacgggcgagaagcctcacaaatgcacttttgaaggttgcacaaaggcctactcgagactagaaaacttgaaaacacacttgagatctcacactggagagaaaccatacgtctgtgagcacgaaggttgcaacaaggctttctcaaatgcctctgatcgcgccaaacaccaaaacagaacgcattccaatgagaaaccatatgtgtgcaaaatcccaggctgcactaagcgttacacagacccaagctccctccggaaacatgtgaagacagtgcatggcccagaggctcatgtcaccaagaagcagcgaggggacatccatcctcggccgccacccccgagagattccggcagccattcacagtccaggtcgcctggccgaccgactcagggagcccttggtgagcagcaggacctcagcaacactacctcaaagcgggaagaatgcctccaggtgaaaaccgtcaaggcagagaagccaatgacatctcagccaagccctggtggtcagtcttcatgcagcagccaacagtcccccatcagcaactattccaacagtgggctcgagcttcctctgaccgatggaggtagtataggagacctcagtgccatcgatgaaaccccaatcatggactcaaccatttccactgcaaccacagcccttgctttgcaagccaggagaaacccggcagggaccaaatggatggagcacgtaaaactagaaaggctaaaacaagtgaatggaatgtttccgcgactgaaccccattctaccccctaaagcccctgcggtctctcctctcataggaaatggcacacagtccaacaacacctgcagcttgggtgggcccatgacgcttctcccgggcagaagcgacctctctggggtggacgtcactatgctgaacatgctcaacagaagggacagcagcgccagcaccatcagctcggcctacctgagcagccgccgctcctcagggatctcgccctgcttctccagccgccgctccagcgaggcgtcacaggccgagggccggccgcagaacgtgagcgtggccgactcctacgaccccatctccaccgacgcctcgcgccgctccagcgaagccagccagagcgacggcctgcccagcctgctcagcctcacgcccgcccagcagtaccgcctcaaggccaagtacgcggctgccacaggagggccgccgccgacgcccctgcccaacatggagaggatgagcctgaagacgcgcctggcgctgctcggggatgccctcgagcctggcgtggccctgcctccagttcatgccccgaggaggtgcagcgacgggggagcccacggctacgggcggcgccacctgcagccgcacgatgcgccgggccacggcgtgaggagggccagcgacccggtgcggacaggctccgagggcctggccctgcctcgtgtgccgcgcttcagcagcctcagcagctgcaaccccccggcgatggccacgtccgcggagaagcgcagtctcgtgcttcagaattacacgcggcccgagggcggccagtcccgaaacttccactcgtccccctgtcctcccagcatcaccgagaacgtcaccctggagtccctgaccatggacgctgatgccaacctgaacgatgaggatttcctgccggacgacgtggtgcagtatttaaattcccagaaccaagcagggtacgagcagcacttccccagcgccctcccggacgacagcaaagtgccccacgggcccggtgactttgacgcgcccgggctgccagacagccacgctggccagcagttccatgccctcgagcagccctgccccgagggcagcaaaaccgacctgcccattcagtggaacgaagtcagctccggaagcgccgacctgtcctcctccaagctcaagtgtgggccgcggcccgctgtgccgcagactcgcgcctttgggttctgcaacggcatggtcgtccacccgcagaaccccttgaggagcgggcctgctgggggctatcagaccctcggggagaacagcaacccctacggtggcccagagcacttgatgctccacaacagccccggaagtggcaccagtggaaacgccttccatgaacagccctgtaaggccccgcagtatgggaactgtctcaacaggcagccagtggcccctggtgcactcgacggtgcctgtggtgccgggattcaagcctcaaagctgaagagcacccccatgcaagggagcgggggccagctgaatttcggcctgccggtagcgccaaatgagtcagctggcagcatggtgaatggcatgcagaaccaggacccagtgggacaggggtacctggctcaccagctcctcggcgacagcatgcagcacccgggggcaggccgccccggtcagcagatgcttgggcagattagtgctacctcacacatcaacatctaccaagggccagagagctgcctgccaggggctcacggcatgggcagccagccgtcaagcttggcagttgtcaggggctaccagccatgtgccagctttgggggcagcaggcgccaggctatgccgagggacagccttgctctgcagtcaggacagctcagtgacacaagtcagacctgcagggtgaatggtatcaagatggagatgaaagggcagccccatccgctgtgctctaatctgcagaattactctggtcagttctatgaccaaaccgtgggcttcagtcagcaagacacgaaagctggttcattctctatttcagacgccagctgcctgctacaggggaccagcgccaaaaactctgagttactttccccaggtgctaatcaggtgacaagcacagtggacagcctcgacagccatgacctggaaggggtacagattgacttcgatgccatcatagacgatggggaccactccagcctgatgtcgggggccctgagcccaagtatcattcagaacctttcccatagctcctcccgcctcaccacgcctcgggcgtccctcccattcccagcgctgtccatgagcaccaccaacatggctatcggggacatgagttctttgctgacctccctagcggaagaaagcaaattccttgcagttatgcaataggctttaggaaaaaaagactgcaaccaacggaaatcaataggagttgaagagattaaactgactttgttttggctgtttttttagttctgtatgtattttagcaatctcatctcacctaactgagatgtgtttcaattatattccttttatggaaaaggactctgaaaaaccctaaagtattctagggagaaactgtcttccatttcagttttgaatcagtattgttacactcaaaccaccctcttttt

SEQ ID NO: 8752 - DNA, 1017 bp, Homo sapiens
gagtctggaccacgcagactcagaacagcactactcacagcagggcctcttgctcgctctagctgctgggaggaaaacggcttgctaatctccacgcccagaaattcagacaagagcattctccttatctcatctgcacaggaagcaggtctaagtgtaatttcacaagcccctgactctgtgtagacacccagctctccagaaaaatgctttgaagacaaaggatacagcatacagtcccgtgtctcggctgagtcatcgcattccttaatagtgtcttctccccgggtttggtggcctgcttctggagtggtcagttctgctgccgacatgcccacccagctcgagatggccatggacaccatgattagaatcttccaccgctattctggcaaggaaaggaagagattcaagctcagcaagggggaactgaaactgctcctgcagcgagagctcacggaattcctctcgtgccaaaaggaaacccagttggttgataagatagtgcaggacctggatgccaataaggacaacgaagtggattttaatgaattcgtggtcatggtggcagctctgacagttgcttgtaatgattactttgtagaacaattgaagaagaaaggaaaataaaggtaagtaataagctcatctaaaggcagaaatatatccaaagttatgtacttaatgttcatttataccgttcagatctatagacccagtaatgtcatttatagctataatatccagtgcatatattaataattaattgctactattgaattatgtgccccttaaaatattgactttatgtagatattctaaatctcatatgccctacttgaaacttgcctgtattattaagaggctatatgcatctttttggtttgtcaaaacgagggcattacaaaaatttagctactttcaaatgagacttgaatttggcaaatttctaagatggacattcatatccttaaattgtattttgaacttcttaccctattaaaaaaaattaactgg

SEQ ID NO: 8753 - DNA, 853 bp, Homo sapiens
ctcatatggtgcctgaggttttgagcttccttaaggttacttggccccttcaagactgttctgaactccctcaactctctctgcagggcatggagattgtacagaccatgaacagtgatcctggcctggcagtggggtacacagcttttaatggagttgacttcgaagggaccttccatgtgaatacccagacagatgatgactatgcaggctttatctttggctaccaagatagctccagcttctacgtggtcatgtggaagcagacggagcagacatattggcaagccaccccattccgagcagttgcagaacctggcattcagctcaaggctgtgaagtctaagacaggtccaggggagcatctccggaactccctgtggcacacgggggacaccagtgaccaggtcaggctgctgtggaaggactccaggaatgtgggctggaaggacaaggtgtcctaccgctggttcctacagcacaggccccaggtgggctacatcagggtacgattttatgaaggctctgagttggtggctgactctggcgtcaccatagacaccacaatgcgtggaggccgacttggcgttttctgcttctctcaagaaaacatcatctggtccaacctcaagtatcgctgcaatgacaccatccctgaggacttccaagagtttcaaacccagaatttcgaccgcttcgataattaaaccaaggaagcaatctgtaactgcttttcggaacactaaaaccatatatattttaacttcaattttctttagcttttaccaacccaaatatatcaaaacgttttatgtgaatgtggcaataaaggagaagagatcatttttaaaaa

SEQ ID NO: 8754 - DNA, 549 bp, Homo sapiens
gaggcaggtattgaggataggagagtatatgggtttggcaccatggggtggataggcaaaacaatttggttgataaggcgcagatcctgaactaaattgtaagacttgtctggttttaggacaggtaaaatgggggaattgtaaggagattttataggttttaaaaggccatcctctagcagctactgccttcctcatcaacaaagtgccccttcctgttgacaagttggcacctttacctctggacaacattcttccctttatggatccattaaagcttcttctgaaaactctgggcatttctgttgagcaccttgtggaggggctaaggaagtgtgtaaatgagctgggaccagaggcttctgaagctgtgaagaaactgctggaggcgctatcacacttggtgtgacatcaagataaagagcggaggtggatggggatggaagatgatgctcctatcctccctgcctgaaacctgttctaccaattatagatcaaatgccctaaaatgtagtgacccgtgaaaaggacaaataaagcaatgaatac

SEQ ID NO: 8755 - DNA, 792 bp, Homo sapiens
gtgtcccaggaggccccgcggccagctccgggcagaggcgccaggagctctctcgccccattccctgcgggcacaggtggggccgttaggggttgaccttggaagtaaaacgccttcaggaattagttttccttccagcagggtggatggggagcatcgctggctgacaggctggtcagaaaatgtgatgttctgaatcgtggattttcaggttacaataccaggtgggccaaaattatccttccaagattaatcaggaaaggaaacagtttggacatcccagtagcagttacaattttctttggggccaatgacagtgcactaaaagatgagaatcccaagcagcacattcccctggaggagtacgctgcgaacctaaagagcatggtgcagtacctgaagtccgtggacatccctgagaatcgagtcattctcatcacgccgaccccactttgtgaaacagcctgggaagaacagtgcatcatacaaggttgcaaactaaatcgcctgaactctgttgttggtgaatatgccaatgcgtgtttacaagtggcccaagactgtgggactgacgtacttgacctgtggaccctgatgcaggacagccaggccatatttacctgttaaggttctttcaaataacctgagaatcatgtcatatgattcagaagacctggaatgaggtcccagctcacttaatggacttctcatcttatttatcagatggactacatttgtctccaaaggggaatgaatttttgttctcgcatctctggcctttgatagagaaaa

SEQ ID NO: 8756 - DNA, 561 bp, Homo sapiens
tgcgaatccggtgccggcaagcggctggcgatgctggaggttcgctagccgaagcggctgcatctggcgccgcgtctgccccgcgtgctcggagcggattctgcccgccgtccccggagccctcggcgccccgctgagcccgcgatcacttcctccctgtgaccaaccggcgctgcaggttagagcctggcaatgccgtttgggtgtgtgactctgggcgacaagaagaactataaccagccatcggaggtgtttgactggatcctggaccagggctactactcggagcgagacacaagcaacgtggtacggcaagtcctggaggccgtggcctatttgcactcactcaagatcgtgcacaggaatctcaagctggagaacctggtttactacaaccggctgaagaactcgaagattgtcatcagtgacttccatctggctaagctagaaaatggcctcatcaaggagccctgtgggacccccgaccccagaggtggtaggccggcagcggtatggacgccctgtggactgctgggccattggagtcatcatgtacatcct

SEQ ID NO: 8757 - DNA, 1709 bp, Homo sapiens
aggacaaccaaaactgctctgctcttccgaaaattgcagtcagggaacctgggacccggcaagccagcagaaggaggaacgggcaacttggtttcttctttagcttccttgttctcattaagattgaacaatgcctctaaagtgaaccacagacttgcatgcaagctgaaaacctttaccaaatgcagtcttaatttgtactttgagaaaaacattttcaagacactgaggggcaccagaggagcagactacaagaatggcacacgctatggaaaactcctggacaatcagtaaagagtaccatattgatgaagaagtgggctttgctctgccaaatccacaggaaaatctacctgatttttataatgactggatgttcattgctaaacatctgcctgatctcatagagtctggccagcttcgagaaagagttgagaagttaaacatgctcagcattgatcatctcacagaccacaagtcacagcgccttgcacgtctagttctgggatgcatcaccatggcatatgtgtggggcaaaggtcatggagatgtccgtaaggtcttgccaagaaatattgctgttccttactgccaactctccaagaaactggaactgcctcctattttggtttatgcagactgtgtcttggcaaactggaagaaaaaggatcctaataagcccctgacttatgagaacatggacgttttgttctcatttcgtgatggagactgcagtaaaggattcttcctggtctctctattggtggaaatagcagctgcttctgcaatcaaagtaattcctactgtattcaaggcaatgcaaatgcaagaacgggacactttgctaaaggcgctgttggaaatagcttcttgcttggagaaagcccttcaagtgtttcaccaaatccacgatcatgtgaacccaaaagcatttttcagtgttcttcgcatatatttgtctggctggaaaggcaacccccagctatcagacggtctggtgtatgaagggttctgggaagacccaaaggagtttgcagggggcagtgcaggccaaagcagcgtctttcagtgctttgacgtcctgctgggcatccagcagactgctggtggaggacatgctgctcagttcctccaggacatgagaagatatatgccaccagctcacaggaacttcctgtgctcattagagtcaaatccctcagtccgtgagtttgtcctttcaaaaggtgatgctggcctgcgggaagcttatgacgcctgtgtgaaagctctggtctccctgaggagctaccatctgcaaatcgtgactaagtacatcctgattcctgcaagccagcagccaaaggagaataagacctctgaagacccttcaaaactggaagccaaaggaactggaggcactgatttaatgaatttcctgaagactgtaagaagtacaactgagaaatcccttttgaaggaaggttaatgtaacccaacaagagcacattttatcatagcagagacatctgtatgcattcctgtcattacccattgtaacagagccacaaactaatactatgcaatgttttaccaataatgcaatacaaaagacctcaaaatacctgtgcatttcttgtaggaaaacaacaaaaggtaattatgtgtaattatactagaagttttgtaatctgtatcttatcattggaataaaatgacattcaataaat

SEQ ID NO: 8758 - DNA, 433 bp, Homo sapiens
agaatctgtatgctttaatagttctaagtcccccaagccttcctacagcaacttcccactccaggtggccagacgggagttccagaccagtgttgtctcccgggacattgacacagcagccaagtttattggtgctggggcagccacagttggtgtggctggttcaggggctggcattggaaccgtgtttggcagcttgatcattggctatgccaggaacccgtctctcaagcagcagctcttctcctatgccattcttggctttgccctgtctgaggccatggggcttttctgtttgatggtcgccttcctcatcctcttcgccatgtgaggctccatgggggggtcaccggcctgttgctactgcaactccacaccattcttggtgctggggtgtgttaagctttaccattaaacacaacgtttctctaaa

SEQ ID NO: 8759 - DNA, 566 bp, Homo sapiens
gaatctcccgttcagaaacatcgcttagtcctcatttactcactgggaacctcggaggatttcagctgatgtttttctctccttagacagtgaggagctcaacataacagggaaaaggagcacaggatgcagctacttggagggtgttgattgaaaacttcgatctccccaccccattcacggttgatttgacggatttctcacctcgttcacagagaaaatttcaattaaggaacaaacatgctacaaagtttcagccaatgagatacaagggaactgatttcttgtggggctttaagagagaaacaaggaagattgagttctcgttcttgcagatcctgatgtgtgtcaattggtagatggagctgcttccgtcatcttcaaggaggagataagaggctcaggcccctttagatggaatataatacagcagaagccttttcatcaaaaggattaatgcctgcatcatcatttctgcaataaaacaagaagctaagtggtggaggccacagacacctcaaacctggattccacaattctacgttaagtgttggagtttttattac

SEQ ID NO: 8760 - DNA, 931 bp, Homo sapiens
atcttgtgattcctttttcctcctgaaccctccagtgggggtgcgagtttgtctttatcaccccccatcccaccgccttcttttcttctcgctctcctacccctccccagcttggtgggcgcctctttcctttctcgcccactttcatttttatttattcatatttatttggcgcccgctctctctctgtccctttgcctgcctccctccctccggatccccgctctctccccggagtggcgcgtcgggggctccgccgctggccaggcgtgatgttgcacgtggagatgttgacgctggtgtttctggtgctctggatgtgtgtgttcagccaggacccgggctccaaggccgtcgccgaccgctacgctgtctactggaacagcagcaaccccagattccagaggggtgactaccatattgatgtctgtatcaatgactacctggatgttttctgccctcactatgaggactccgtcccagaagataagactgagcgctatgtcctctacatggtgaactttgatggctacagtgcctgcgaccacacttccaaagggttcaagagatgggaatgtaaccggcctcactctccaaatggaccgctgaagttctctgaaaaattccagctcttcactcccttttctctaggatttgaattcaggccaggccgagaatatttctacatctgtgagtatatagagatttatcgtgttgtagggcagctgcaagaacccagactaattttttacccatgtttcagagaattgcagagagctggactctgcattacagatatctccttgtaaatgcgtacatcaggatccctagatacattagctgggaattgagagcacaaattagattaaagacagagcgcgtctccccctatgaaattacgtgtcagcctgttcactgaaccactgctgac

SEQ ID NO: 8761 - DNA, 2825 bp, Homo sapiens
attgtagaacctttagaaaaatatagaagaacaccaagtagaaactagccttctagtctttatagatatcaattcaacatttgttattaaatttcgagctcaaataatatgtcttgttctgggttcactgtgaccaccgtgacattgtttgaattccatccatgggaatttcatgttcttgtttgcatctcatgggctggtgatttctgtctttcagtcttttggttttattttttagaacgggccccttgtcagtctcaatgaaaaagatacgaggagattccacttctcttactgaattgtggattttggtaacaacagatgacatttcatttatattagtgtagtgttctagaaagccttcgtgggcatttttggtttcgtagccgatagacctctggctgtggggccagatccagttttctcagtttgactttagaaggtttcagccatccctgacttgaagggaaagggaaacctgggataaagctataacctggggaactgtgttctcttttttacagaaagactttttatccatcgagctgtttcgtggcagagtgaaggttatgactgacctgggttcaggacccattacccttttgacagacagacgttataacaatggaacctggtacaaaattgccttccagcgaaaccggaagcaaggagtgctagcagttatcgatgcctataacaccagtaataaagaaaccaagcagggcgagactccgggagcatcttctgacctcaaccgcctagacaaggacccgatttatgtgggtggattaccaaggtcaagagttgtaaggagaggtgtcaccaccaaaagctttgtgggctgcatcaagaacctggaaatatccagatcaacctttgacttactcagaaattcctatggagtgagaaaaggctgtttactggagaatcagaatggctggtaacatttgccaccacgaacagcagtggcatcatcctggctgccctcggcggggatgtggagaagcggggtgatcgtgaggaagcacacgtgcccttcttttccgtcatgctgatcggaggcaacattgaggtacatgtcaatcctggggatgggacaggcctgagaaaagctctcctgcacgctcccacgggtacctgcagtgatggacaagcgcattccatctccttggtcaggaatcggagaattatcactgtccaattggatgagaacaatcctgtggaaatgaagttgggcacattagtagaaagcaggacgataaatgtgtccaatctgtacgtcgggggaattccagagggagaggggacgtcactgctcacaatgagaagatcgttccatggctgtatcaaaaacctgatcttcaatttggaacttttggatttcaacagtgcagttggccatgagcaagtcgacctggacacctgctggctgtcagaaaggcctaagctggctcccgatgcagaggacagcaagctcttgccagagccccgggcttttccagaacagtgtgtggtggatgcagctctggagtacgttcccggcgctcaccagtttggtctcacacaaaacagccatttcatcttgccttttaatcagtcggctgtcagaaagaagctctcggttgagctaagcatccgcacgttcgcctccagcggcctgatttactacatggctcatcagaaccaagcagactacgctgtgctccagctgcacgggggccgcctccacttcatgtttgaccttggcaaaggcagaacaaaggtctctcaccctgcactgctcagtgatggcaagtggcacacggtcaagacagactatgttaaaagaaaaggcttcataactgtcgacggccgagagtctcccatggtgactgtggtgggagatggaaccatgctggatgtggagggtttgttctacctaggaggcctgccctcccagtaccaggccaggaaaattggaaatatcacccacagcatccctgcctgcattggggatgtgacggttaacagcaaacagctggacaaggacagcccggtgtctgccttcacggtgaacaggtgctacgcagtggcccaggaaggaacatactttgacggaagcggatatgcagctcttgtcaaagagggctacaaagtccagtcagatgtgaacatcacactggagtttcgaacctcctcgcagaatggcgtcctcctggggatcagcactgccaaagtggatgccattggactagagcttgtggacggcaaggtcttgttccatgtcaacaatggtgctggcaggataacagctgcatatgagcccaaaaccgccactgtgctctgtgatggaaaatggcacactcttcaagctaacaaaagcaaacaccgtatcactctgattgttgacgggaacgcagttggcgctgaaagtccacacacccagtctacctcagtggacaccaacaatcccatttatgttggtggctatcctgctggtgtgaagcaaaaatgcctgcgcagccagacctcgttccgcgggtgtttgaggaagctagctctgattaagagcccgcaggtgcagtcctttgacttcagcagagcgttcgaactgcacggagttttccttcattcctgtcctgggaccgagtcctgaacttcaagcagaatcctcagttggaatcattgctaatattttgaggagaagtgtatgtgtgaattaagaatctcttcagttcatatttcatttccaactcaggttaagtgtttctggggagagatgttgtgtttacgttacactaaaaccacatgtgcaacaaatacctccattaaatggtctaaaatgt

SEQ ID NO: 8762 - DNA, 568 bp, Homo sapiens
agaggtgccctcggtgatagaggaaacatggccgagtatacgcggctgcacaacgccttggcgctaatccgcctccgaaacccgccggtcaacgcgatcagtacgactttactccgtgacataaaagaaggactacagaaagctgtaatagaccatacaataaaagccattgtgatttgtggagcagagggcaaattttctgcaggtgctgatattcgtggcttcagtgctcctaggacatttggccttacactgggacatgtagtagatgaaatacagagaaatgagaagcccgtggtggcagcaatccaaggcatggctttcggagggggactagagctggccctgggctgtcactataggattgcccacgcagaggctcaagttggcttaccagaagttacactgggacttctccctggtgcaagaggaacccagcttctccccagactcactggagttcctgctgcacttgacttaattacctcagctttcaaagtgagatgactctcagattcattgaagacgtattttagcagatgaagcactcaagctgggcattctagat

SEQ ID NO: 8763 - DNA, 564 bp, Homo sapiens
ttctctcctctccctcctgcgctcacacactcactcacacacaatgtgccatcctgacaaggcttttacttctgataagctccaatgtgtgtttaatgaatacaaagccgcggtctgggtgccgcctcggccgcggccgctctcccgcgctcctttgccagaagtatcaaatgataagaactgagcacactggatgaaataatacttgcactgggagcactaagaaaagattgatctctgggctggtgaacataatctctgtcccagtcagaaaaggagagaggaaattagcagagcgattggtggagaatgatatctgtcaaaagaaacacttggagagcactgagtttagtaataggtgactgccggaaaaaagggaactttgaatattgtcaagatcgtactgagaagcactccacaatgccagactcacctgtggatgtgaagacgcaatctaggctgactcctccaacaatgccacctcccccaactactcaaggagctccaagaaccagttcatttacaccgacaacgttaactaatggcacgagccattctcctaca

SEQ ID NO: 8764 - DNA, 563 bp, Homo sapiens
gactcgggctccccaggacaatgtctctttcttcaccaagctgatgggtgaagtagagaaataaagtctccccgctgaactactatgaggtcagaagccttgctgctatatttcacactgctacactttgctggggctggtttcccagaagattctgagccaatcagtatttcgcatggcaactatacaaaacagtatccggtgtttgtgggccacaagccaggacggaacaccacacagaggcacaggctggacatccagatgattatgatcatgaacggaaccctctacattgctgctagggaccatatttatactgttgatatagacacatcacacacggaagaaatttattgtagcaaaaaactgacatggaaatctagacaggccgatgtagacacatgcagaatgaagggaaaacataaggatgagtgccacaactttattaaagttcttctaaagaaaaacgatgatgcattgtttgtctgtggaactaatgccttcaacccttcctgcagaaactataagatggatacattggaaccattcggggatgaattcag

SEQ ID NO: 8765 - DNA, 688 bp, Homo sapiens
ggggccgcggcgagggcgcgcgcgggcgggcggggaggcggaggcggcgagagcggaggcccggaggaactcggagggggagggagagaaaggccgagacggagggagccagcggcggccgaggggctggtccaggcgcggccgctaagaggagaccaagaggcgggggctgcacttgacaaccagcatgccgagatgtcagaagaggcagaagtggatgtgagagaaagagagacacagagagacagagagccaaagagggcaagagacttgactttaagagactcctgtactgacaactccatgcagttcggaaccagaacgactacggctgaaccagggttcatggggacatggcaaaacgctgatactaacctcttattcagaatgtcccaacaggccatccgttgcacactggtaaactgcacatgtgaatgttttcagccagggaagattaacctgaggacttgtgatcagtgtaaacatggctgggtggcacatgccttggataagctcagcacgcagcacctgtaccaccccacccaagtggagattgtgcagtccaacgtcgtgtttgacatcagcagcctgatgctctatgggacacaagcagtgcctgtgcggctaaagatcctgctggaccgtctcttcagcgtcctgaagcaagaggaggtactgcacatactgc

SEQ ID NO: 8766 - DNA, 1846 bp, Homo sapiens
ggtccgctcttgctgagcccagagccatcccgcgctctgcgggctgggaggcccgggccaggacgcgagtcctgcgcagccgaggttccccagcgccccctgcagccgcgcgtaggcagagacggagcccggccctgcgcctccgcaccacgcccgggaccccacccagcggcccgtacccggagaagcagcgcgagcacccgaagctcccggctggcggcagaaaccgggagtggggccgggcgagtgcgcggcatcccaggccggcccgaacgctccgcccgcggtgggccgacttcccctcctcttccctctctccttcctttagcccgctggcgccggacacgctgcgcctcatctcttggggcgttcttccccgttggccaaccgtcgcatcccgtgcaactttggggtagtggccgtttagtgttgaatgttccccaccgagagcgcatggcttgggaagcgaggcgcgaacccggcccccgaagggccgccgtccgggagacggtgatgctgttgctgtgcctgggggtcccgaccggccgcccctacaacgtggacactgagagcgcgctgctttaccagggcccccacaacacgctgttcggctactcggtcgtgctgcacagccacggggcgaaccgatggctcctagtgggtgcgcccactgccaactggctcgccaacgcttcagtgatcaatcccggggcgatttacagatgcaggatcggaaagaatcccggccagacgtgcgaacagctccagctgggtgagttgggtatgggaccaggagttagtgacctcccgaccccccatgtggaccccaccatagggcaagtcctggaaagattcacgttgcctgttacttctggtttaaagagcataaagttttcagtttcaactccatctcatcttgcctccttaatataaaagggattccctttctgttaatatcgttctcccttttccttatggcaatgattgcagtactctgacaactatgctagagaaatttcttatgataccttctcttcatctctccccgtctctccgtgtgtaaagcacattttagactctctcagcgtattaaggacaggatccagctaagccaagacttgagaattttatttccatctttgacctatcaaccctcttaaagaacaggctaaggagcatatcaggaatagcaattggaattgatcccatatcccgtcgtttaacctaaaggcctaaaaaaaaaagtgatagttttacttacaatatacaatctaaaagaaaaggaaaattggcatcttcatcgttaatgtagtataattttccattcccaaaaccgtcatccaaaactcatgttatatgggtccatctttttgcagtcatttctcaatgtctcagatttgtgacaagttgaaaaatgtgtactgatagaggggagaagtttcatgtttcaaagccaaagacaagtttgttgcacacaggcaagtggggaaagaggaaggaatattaaataacaagacctatcttgttccaaagtgttactgctatatatattgcttaacttttttccccttaaagcaaccctgggtcatggttgacattgttcctagtttatgtatgaggactgtggctcagagttgcaaatacctttttaaaagttacttagctagtgactgataggtgggaactaaagtcaaactagggtctgaatgcgtccaaagtctaagccattttcttccatgtatgtatcttcaatgcaaataaaattaagtgaatggtttaatatgttgtctgctgagctgatgggtcatctgtaaacggtgaataaaattggtacttctttatattt

SEQ ID NO: 8767 - DNA, 591 bp, Homo sapiens
aagacagtcagtgcctctgctcataggtgagcagaacacaagatgcatggagcatcgtcttccagcaagtatgtgttggagtcttctgagtgtgcttttgacttcctagggcttttctattcacggagctgagatgaaccctgagctctcagacagggaggctctgggctggttctctctacagatggcctgtattttctccgcaccaagaatggtgttgtctaccagaccttctgtgacatgacttctgggggtggcggctggaccctggtggccagcgtgcacgagaatgacatgcgtgggaagtgcacggtgggtgatcgctggtccagtcagcagggcaacaaagcagactacccagagggggatggcaactgggccaactacaacacctttggatctgcagaggcggccacgagcgatgactacaagaaccctggctactacgacatccaggccaaggacctgggcatctggcatgtgcccaacaagtcccccatgcagcattggagaaacagcgccctgctgaggtaccgcaccaacactggcttcctccagagactgggacataatctgtttggcatctaccag

SEQ ID NO: 8768 - DNA, 806 bp, Homo sapiens
ggattcctgtctggggatgcgtcttctgctccggagaggccctaattgcctccacaaggagcggcaaagcctgcccgggtggcatctgactggagccatgccacagcctatacgaatctatgttggagcccttgaaccttcccccagagcaagcgtcaccgaggcagaccgatttttgggagggagacagacatcagagcgggggagacccagtacctagggctcacctggttcccccaggcttagcctcctccagggcttagtgtttgagtgagagattgtcccccctggacaattctgtagattctgactctgctcctgccttgccctgaacttcccagaacctcagtttcttcctttgggaaatatgcatgctggtcataccaacatccttgggtgggcagatgagactcttgggtgcctggcattactgcaacagaactcaatgcatagtaagtgctgactcaatgtgctcctggctgcatcctctacttcctgataaattctctggtggtgttttctctacaaggctagtactggcaggggcaagtgaggaacaagatcaaggtgtgcatatatgtcagcaagagggacccttcaccctcacaaattctgcagtgtgtttttaatgatgtgtctttgggtgatgagtatgctctgggactaggtggaggtggtggttgcatctcccatgtagctcatggtcaatacaggtggtgattgtacaatattgtgaatatatgaaacaccattgaaggaggggggaaggaaagaaagaaaaataggagaagaaaggaagaaagaaa

SEQ ID NO: 8769 - DNA, 1919 bp, Homo sapiens
actctgaaagatcctcattatcctgaccatgatcttggaatcattttgctctcagtcatccttacccctaaagaaggagagtccagggatgtggaactttcagaaaatgaagtggttggatcttatttctctgtgaagtctctcttttggaggtttcagacccaaagtttacgcctatcagacctacacagaaaatcgcatctttggagaggaatagtcagcatcaccttgattgaagggagagacctcaaggccatggattccaacgggttgagcgatccctacgtgaagttccggcttgggcatcagaagtacaagagcaagattatgccaaaaacgttgaatcctcagtggagggaacaatttgattttcacctttatgaagaaagaggaggagtcattgatatcactgcatgggacaaagatgctgggaaaagggatgatttcattggcaggtgccaggtcgacctgtcagccctcagtagggaacagacgcacaagctggagttgcagctggaagagggtgagggacacctggtgctgctggtcactctgacagcatcagccacagtcagcatctctgacctgtctgtcaactccctggaggaccagaaggaacgagaggagatattaaagagatatagcccattgaggatatttcacaacctgaaagatgtgggatttctccaggtgaaagtcatcagagcggaagggttaatggctgccgacgtcactggaaaaagtgacccattttgtgtggtagaactgaacaacgatagactgctaacacatactgtctacaaaaatctcaatcctgagtggaataaagtcttcacgttcaacattaaagatatccattcagttcttgaagtgacagtttatgatgaagatcgggatcgaagtgctgactttctgggcaaagttgctataccattgctgtctattcaaaatggtgaacagaaagcctacgtcttgaaaaacaagcagctgacagggccaacaaagggggtcatctatcttgaaatagatgtgatttttaatgctgtgaaagccagcttacgaacattaatacccaaagaacagaagtacattgaagaggaaaacagactctctaaacagctgctactaagaaactttatcagaatgaaacgttgtgtcatggtgctggtaaatgctgcatactacgttaatagttgctttgattgggattcacccccaaggagtctcgctgcttttgtggtatgatcatactgtattacttacattgttattcattaaattcagtaatcatagctgcatgtttctgtggctatagtaacagttatgttgatgtggccattttaaaactcctattttaagacttgactggacagatttgccgtgggcaggaacctgatggattgtacaaggtctgagtctaagaatacattttcccccctcagatttccggaacgcaagacatctcagccaatgtatcattttctctgtgacagttaaaaagtaaaattttacatattgcataattccaaaccccaataggacagccaagaaaagtcctccatgtgaaaaataataatagtaataatctcgaccattctcaatttgattttatctgtcctatagttaatttttttcaagatatgaaaatcattggtagtagaatgctaccaatgctacttggtaatgctttaacatgtgattcaactggaagtggatgtgacctatttaagagatgttttattatttctgagatttctagcttttaaaagtcacaagtgagaattcgatagatccaaagagtcctttaatatgttcatcttgtggccttttactttgattatttaaaaacttctgatgagaccaactggcagagctagaaaatccaaaagaatactttgctctgagctttagctgggatt

SEQ ID NO: 8770 - DNA, 1266 bp, Homo sapiens
tggctggcggccccgccccgccccgcccggctgctccatggcgctgtgcgaggccgcgggctgcgggagtgccctgctctggcctcgcttgttgctcttcggggactccatcacccagttttccttccagcagggtggatggggagcatcgctggctgacaggctggtcagaaaatgtgatgttctgaatcgtggattttcaggttacaataccaggtgggccaaaattatccttccaagattaatcaggaaaggaaacagtttggacatcccagtagcagttacaattttctttggggccaatgacagtgcactaaaagatgagaatcccaagcagcacattcccctggaggagtacgctgcgaacctaaagagcatggtgcagtacctgaagtccgtggacatccctgagaatcgagtcattctcatcacgccgaccccactttgtgaaacagcctgggaagaacagtgcatcatacaaggttgcaaactaaatcgcctgaactctgttgttggtgaatatgccaatgcgtgtttacaagtggcccaagactgtgggactgacgtacttgacctgtggaccctgatgcaggacagccaggacttctcatcttatttatcagatggactacatttgtctccaaaggggaatgaatttttgttctcgcatctctggcctttgatagagaaaaaggtctcttctctacctttgctgcttccttactggcgggatgtagcagaagcaaaacctgaattaagtctgctgggagatggagaccattagccaatcacaggagacccaaatctgcttgttatctacagaactcaaagttgtcaatacgtagaggtacgcttttttcctcaggcttaaacctttgccactgatattaataataaaagtattagatgatttttcagggaagttttatacttaggtccattgtgtttcgacagtatttattaatgcagatatcagtgctacagctataaaatataccctgagcagcttgttaattctataaatgacaaagactatgtttttaaaaagtcacaattttataaaaatggtttttcttacattcttttgagaactgtttcactcatacatacacccacacaccccactcaaccttgtatcaaattccaaaagtgtaactaaagtataagaatatcatgactagttaaaagatagcaaataccataaggtacaagttcaagtattagtataacaagtatctgagtaacaaatgtccttggaaatggggg

SEQ ID NO: 8771 - DNA, 870 bp, Homo sapiens
gtttggatgatatggccattgcccaccactacagggactcctatcgacaccccagccacagggacctcagggacagaaacagacctatggggttgcatggcacacgtcaagaagaaatgattgatcacagactaacagacagagaatgggcagaagagtggaaacatcttgaccatctgttaaactgcataatggacatggtagaaaaaacaaggcgatctctcaccgtactaaggcggtgtcaagaagcagaccgggaagaattgaattactggatccggcggtacagtgacgccgaggacttaaaaaaaggtggcggcagtagcagcagccactctaggcagcagagtcccgtcaacccagacccagttgcactaggatgaaggccatacctaggtgctgcccagctttgagcattgctgtcctgggtcatatgaggtcacattgcttctccaaaggctatcagctcatcccttcatgtatattgatggcggcccttgcagtatctagtatccaatggtctccatcctgtcacgcgcatcgggaattccttcacaggcctgcgtctggatacgtgccagaggagatctggaagaaagctgaggaggccgtcaatgaggtgaagcgccaggcgatgacggagctgcagaaggccgtgtctgaggcggagcggaaagcccacgacatgatcacaacagagagggccaagatggagcgcacggtcgccgaggccaaacggcaggcggcggaggacgcactggcagttatcaatcagcaggaggattcaagcgagagttgctggaattgtggccgtaaagcgagtgaaacctgcagtggctgtaacacagcccgatactgtggctcattttg

SEQ ID NO: 8772 - DNA, 729 bp, Homo sapiens
gtgtgctgtaggataataaagcttttcccccaaaaaacaggtgaatacttaaactaattcaaagagagaagaaagcttcctgaaaggtcatttaattgacttttgctttccaggtgtcaaatcagacactgagcttgttcttcacggttctgcaagatgtcccagtaagagatctgaaaccagccatagtgaaagtctatgattactacgagacggatgagtttgcaattgctgagtacaatgctccttgcagcaaaggtaagccactcacactcctccaaaaggcagtcagagctccttcagcttgccccccaaaccttctccttcataaaacgctgggtaaatatttgtcaaaaacatcaaattactcacactgcacattattatagaaaaacacatttattggagagggccgctgactctgtcaaacctcagagagtccataggattgcttatgggtaatgatttggaatagatttggtttcccactgtactgattaggtttccttgggcactatgctacccagaactaagggaaagaatactctctgctcatggagacccaaatctgtcttaattttttttctttccaatgtcacagatcttggaaatgcttgaagaccacaaggctgaaaagtgctttgctggagtcctgttctcagagctccacagaagacacgtgtttttgtatctttaaagacttgatgaataaacactttttctggtcaa

SEQ ID NO: 8773 - DNA, 693 bp, Homo sapiens
atagctgccaatggctctaatgaagatagaggagaggttgcagatgaagataagagaattataactgatgatgagataataagcttatccattgaattctttgaccagaacaggtaaaatctttaggcaatttattttatgctaatgttttattagattgtttcactaataaattttctctttattagattggatcggaaagtaaacaaagacaaagagaaatctaaggaggaggtgaatgataaaagatacttacgatgcccagcagcaatgactgtgatgcacttaagaaagtttctcagaagtaaaatggacatacctaatactttccagattgatgtcatgtatgaggaggaacctttaaaggattattatacactaatggatattgcctacatttatacctggagaaggaatggtccacttccattgaaatacagagttcgacctacttgtaaaagaatgaagatcagtcaccagagagatggactgacaaatgctggagaactggaaagtgactctgggagtgacaaggccaacagcccagcaggaggtattccctccacctcttcttgtttgcctagccccagtactccagtgcagtctcctcatccacagtttcctcacatttccagtactatgaatggaaccagcaacagccccagcggtaaccaccaatcttcttttgccaat

SEQ ID NO: 8774 - DNA, 946 bp, Homo sapiens
tactgtttccaaactggacactggagaatattcctgtgaagcccgcaattctgttggatatcgcaggtgtcctgggaaacgaatgcaagtagatgatctcaacataagtggcatcatagcagccgtagtagttgtggccttagtgatttccgtttgtggccttggtgtatgctatgctcagaggaaaggctacttttcaaaagaaacctccttccagtaagtatactttcctacaatgcatgtctttctcctatgtcaactaattttctattaatcatctgtttaaagtcaaaagagagaagttgggttatttgtgtaggtttactctcacaagaagttactcaagtttatcaagaaatacatctgtattaggctgttcttgcattgctgtaagaaaatacccgagactgggtagtttattgtaaaaagaggtttaattggctcacggttctgcaagctgtacaatcctggcaccaacactgcttggcttttggggaggcctcaggaagctttttactcatggctgaaggcaaagcgggagcaggcacgtcacatggcaaaagcaggagcaaggttggggaggtgccacatacttttaaacaaccagatttcaagaaaactcagtcactattctgaggacagcatcaagggggcggtactaaaccattcatgagaaatccgcccccatgatttaatcggctccaacaaaccccacctccaacattggggattacaattcaacataagatttgggcaaggcaaatatccagactctatcaacatcccacttcacacttcatacctacttgtaaatggtagtacagagagaatgatgattacccagcctacttgtaaatggtagtacagagagaatgatgattacccagacaagaaatatggtcactaatttgatttcataggcatttgtataaactaacttaaaaaa

SEQ ID NO: 8775 - DNA, 943 bp, Homo sapiens
agctggagcccgcggagcccacggagcccacggagcccacggaggagcccacggaggagccccagcgtccgaacgggcagaccccctcgagccgcgaaggagcccgagaagcagccacgatgtgcggaatctttgcctacatgaactacagagtcccccggacgaggaaggagatcttcgaaaccctcatcaagggcctgcagcggctggagtacagaggctacgactcggcaggtgtggcgatcgatgggaataatcacgaagtcaaagaaagacacattcagctggtcaagaaaagggggaaagtcaaggctctcgatgaagaactttacagtaagtggaggacctctgagtgggaggagccgctgcagcgccggccgctttctaggaccgtattccaacagcgccggagaatggagattctcctttgtcccagctcagataaacagagggagggctaagcccgtgctgtaaaaccgggcttcgcagggtatgggatggtttattttaggtggtggcggcgcatggataatttttttaagtgtgaagggttacatacagtagttattttaattattccagcaaatgatactgcttctctgtttatggtagggatatatcattttctttttaaagcaagtttatttctgtgaagaagtgagctaagctacagacaagtagtaaataaccttcagcacgggtggtttgtgggcctgcgcggactcccagggtgggagctggtggggaggtgccatcggtgtgggtgacgtgacttgggtaacgacaccaggttgcactcacagtcctgggtcgaggcttgttgttcaagtgcggcaaactgattttcctttcatttagaacaagacagcatggacttaaaagtggagtttgagacacacttcggcattgcccacacgcgctgggccacccacggggtccccag

SEQ ID NO: 8776 - DNA, 349 bp, Homo sapiens
gagaagggagtagacaactgttcctgagggaaatctgggaagggttcatggagctgattccagaggggtgactaccatattgatgtctgtatcaatgactacctggatgttttctgccctcactatgaggactccgtcccagaagataagactgagcgctatgtcctctacatggtgaactttgatggctacagtgcctgcgaccacacttccaaagggttcaagagatgggaatgtaaccggcctcactctccaaatggaccgctgaagttctctgaaaaattccagctcttcactcccttttctctaggatttgaattcaggccaggccgagaatatttctacatct

SEQ ID NO: 8777 - DNA, 582 bp, Homo sapiens
tttgctccccttcctttctctctctcccttcccggctcctagactgggtctaggcaggagcttcgccatgatgtcaggagggaaggagatgcctctgggcctcgtaccacagcctcagctctctctctgcccctccatctgagtccctcctggctcccagctccctcagggtgcaaggccaagcctccaaggaatccctccccttacctgcatggctggagccaagaagagccactccatctgagggtggctgcgtgtccacatacgaggggacagggctgaggatgaggagaaccctggggacccagaagaccgtgccttgcctggaagtcctgcctgtaggcctgaaggacttgccctaacagagcctcaacaactacctggtgattcctacttcagccccttggtgtgagcagcttctcaacatgaactacagcctccacttggccttcgtgtgtctgagtctcttcactgagaggatgtgcatccaggggagtcagttcaacgtcgaggtcggcagaagtgacaagctttccctgcctggctttgagaacctcacagcaggatataacaaatttctca

SEQ ID NO: 8778 - DNA, 511 bp, Homo sapiens
gatcatgtgaacccaaaagcatttttcagtgttcttcgcatatatttgtctggctggaaaggcaacccccagctatcagacggtctggtgtatgaagggttctgggaagacccaaaggagtttgcagggggcagtgcaggccaaagcagcgtctttcagtgctttgacgtcctgctgggcatccagcagactgctggtggaggacatgctgctcagttcctccaggacatgagaagatatatgccaccagctcacaggaacttcctgtgctcattagagtcaaatccctcagtccgtgagtttgtcctttcaaaaggtgatgctggcctgcgggaagcttatgacgcctgtgtgaaagctctggtctccctgaggagctaccatctgcaaatcgtgactaagtacatcctgattcctgcaagccagcagccaaaggagaataagacctctgaagacccttcaaaactggaagccaaaggaactggaggcactgatttaatgaatttcctga

SEQ ID NO: 8779 - DNA, 1044 bp, Homo sapiens
ccctcctgcctgtccctttctgtcttctctctctctctcccacttttcctccctctcccgctccgtctcacacgcaccctctgtttattttcctgcctccatctgggccctgctgatattgtaatcaccctgatgcacgttggcttctctcctctccctcctgcgctcacacactcactcacacacaatgtgccatcctgacaaggcttttacttctgataagctccaatgtgtgtttaatgaatacaaagccgcggtctgggtgccgcctcggccgcggccgctctcccgcgctcctttgccagaagctggcggagagaatttacatttaaagattagcagagtgagaaagagaaatctgccttttgttgtgtggggtgaggaggaggcatctacccctggccttgacgctatctcccatcacctctgctatccagacaggactcaccgagaaaagattgatctctgggctggtgaacataatctctgtcccagtcagaaaaggagagaggaaattagcagagcgattggtggagaatgatatctgtcaaaagaaacacttggagagcactgagtttagtaataggtgactgccggaaaaaagggaactttgaatattgtcaagatcgtactgagaagcactccacaatgccagactcacctgtggatgtgaagacgcaatctaggctgactcctccaacaatgccacctcccccaactactcaaggagctccaagaaccagttcatttacaccgacaacgttaactaatggcacgagccattctcctacagccttgaatggcgccccctcaccacccaatggcttcagcaatgggccttcctcttcttcctcctcctctctggctaatcaacagctgcccccagcctgtggtgccaggcaactcagcaagctgaaaaggttccttactaccctgcagcagtttggcaatgacatttcacccgagataggagaaagagttcgcaccctcgttctgggactagtgaactccactttgacaattgaagaatttcattccaaactg

SEQ ID NO: 8780 - DNA, 513 bp, Homo sapiens
aaaaaccttaatagcttttagggttatatatgtttctgtagtttgtggagccaaacagatgatctggttacccacagtatcaaaatgtaacaagttttattttcttacagcattccatggcaatagattctggtttcaggaactctggcataacggtgggaaagagaggaaaaactatgttggctgtccggagtacacatggcttagaagttccattaagccataagggaaaactgatggtgacagaggaatatattgacttcctgttaaatgtggcaaatcaaaaaatggaggaaaacaagaaaagaattgagaggctgtgtggaacatgagaaggataccagtcattgacatcacctaagatggtgacaagacctagaaagaaagatcaagtcaagcatagaagttttcatcaatgttttacaactgcctacagcatgctttggaaagggaaacgatgactaacttacatcccaagatcaaagagaaaaataactcatcatatattcataa

SEQ ID NO: 8781 - DNA, 627 bp, Homo sapiens
gtagtaggtatggagaagccaagggaggcactaagcctctcctgttcctagaacaagttaggctcctgttccttcacccacctttcttcttgtctagctccctactcctgtgagttagcatgtctgaagggtggggcagggagagtaggtccctggttctccaggtcccagggatccatgccttccagtatgtcatctatggaactgcctctttcttcttcctttatggggccctcctgctggctgagggcttctacaccaccggcgcagtcaggcagatctttggcgactacaagaccaccatctgcggcaagggcctgagcgcaacggtaacagggggccagaaggggaggggttccagaggccaacatcaagctcattctttggagcgggtgtgtcattgtttgggaaaatggctaggacatcccgacaagtttgtgggcatcacctatgccctgaccgttgtgtggctcctggtgtttgcctgctctgctgtgcctgtgtacatttacttcaacacctggaccacctgccagtctattgccttccccagcaagacctctgccagtataggcagtctctgtgctgatgccagaatgtatggtgttctcccatggaatgctttcc

SEQ ID NO: 8782 - DNA, 3004 bp, Homo sapiens
attccaatggaacagacagggtaaggaccaatctggactgtgttatcttttccaggtgcaagtatgtgctatggaactcctagttataactatgcaccaaatatggataaacactggattatgcagtacacaggaccaatgctgcccatccacatggaatttacaaacattctacagcgcaaaaggctccagactttgatgtcagtggatgattctgtggagaggctgtataacatgctcgtggagacgggggagctggagaatacttacatcatttacaccgccgaccatggttaccatattgggcagtttggactggtcaaggggaaatccatgccatatgactttgatattcgtgtgcctttttttattcgtggtccaagtgtagaaccaggatcaatagtcccacagatcgttctcaacattgacttggcccccacgatcctggatattgctgggctcgacacacctcctgatgtggacggcaagtctgtcctcaaacttctggacccagaaaagccaggtaacaggtttcgaacaaacaagaaggccaaaatttggcgtgatacattcctagtggaaagaggcaaatttctacgtaagaaggaagaatccagcaagaatatccaacagtcaaatcacttgcccaaatatgaacgggtcaaagaactatgccagcaggccaggtaccagacagcctgtgaacaaccggggcagaagtggcaatgcattgaggatacatctggcaagcttcgaattcacaagtgtaaaggacccagtgacctgctcacagtccggcagagcacgcggaacctctacgctcgcggcttccatgacaaagacaaagagtgcagttgtagggagtctggttaccgtgccagcagaagccaaagaaagagtcaacggcaattcttgagaaaccaggggactccaaagtacaagcccagatttgtccatactcggcagacacgttccttgtccgtcgaatttgaaggtgaaatatatgacataaatctggaagaagaagaagaattgcaagtgttgcaaccaagaaacattgctaagcgtcatgatgaaggccacaaggggccaagagatctccaggcttccagtggtggcaacaggggcaggatgctggcagatagcagcaacgccgtgggcccacctaccactgtccgagtgacacacaagtgttttattcttcccaatgactctatccattgtgagagagaactgtaccaatcggccagagcgtggaaggaccataaggcatacattgacaaagagattgaagctctgcaagataaaattaagaatttaagagaagtgagaggacatctgaagagaaggaagcctgaggaatgtagctgcagtaaacaaagctattacaataaagagaaaggtgtaaaaaagcaagagaaattaaagagccatcttcacccattcaaggaggctgctcaggaagtagatagcaaactgcaacttttcaaggagaacaaccgtaggaggaagaaggagaggaaggagaagagacggcagaggaagggggaagagtgcagcctgcctggcctcacttgcttcacgcatgacaacaaccactggcagacagccccgttctggaacctgggatctttctgtgcttgcacgagttctaacaataacacctactggtgtttgcgtacagttaatgagacgcataattttcttttctgtgagtttgctactggctttttggagtattttgatatgaatacagatccttatcagctcacaaatacagtgcacacggtagaacgaggcattttgaatcagctacacgtacaactaatggagctcagaagctgtcaaggatataagcagtgcaacccaagacctaagaatcttgatgttggaaataaagatggaggaagctatgacctacacagaatgttgctgttcctggtaccctgttcggcccctctaacctccagagctatggtctcagatgcttccttttagagagaaggtcattagtccaccaagaagccaaatgacaacaggaaaggtgatgggaagatgaaaacaaaggaaggtggacttttgggtatatgttatagccataggacagttatgggatggatgggaaggttaatcagccccgtctcactgcagacatcaactggcaaggcctagaggagctacacagtgtgaatgaaaacatctatgagtacagacaaaactacagacttagtctggtggactggactaattacttgaaggatttagatagagtatttgcactgctgaagagtcactatgagcaaaataaaacaaataagactcaaactgctcaaagtgacgggttcttggttgtctctgctgagcacgctgtgtcaatggagatggcctctgctgactcagatgaagacccaaggcataaggttgggaaaacacctcatttgaccttgccagctgaccttcaaaccctgcatttgaaccgaccaacattaagtccagagagtaaacttgaatggaataacgacattccagaagttaatcatttgaattctgaacactggagaaaaaccgaaaaatggacggggcatgaagagactaatcatctggaaaccgatttcagtggcgatggcatgacagagctagagctcgggcccagccccaggctgcagcccattcgcaggcacccgaaagaacttccccagtatggtggtcctggaaaggacatttttgaagatcaactatatcttcctgtgcattccgatggaatttcagttcatcagatgttcaccatggccaccgcagaacaccgaagtaattccagcatagcggggaagatgttgaccaaggtggagaagaatcacgaaaaggagaagtcacagcacctagaaggcagcgcctcctcttcactctcctctgattagatgaaactgttaccttaccctaaacacagtatttctttttaacttttttatttgtaaactaataaaggtaatcacagccaccaaca

SEQ ID NO: 8783 - DNA, 463 bp, Homo sapiens
attcagtcgtccatttggagggaggaatcccttcctcccggtgatccttactcatattctagccaccaaccacggttagtgcttgcggattgccgtgcagggtaggtttcgaatctgggacagcggatggtgaacgttacagtgagagtcatttggaagatgccttagggttggccgagccgagctgctgcccttgactggtgctcaggggaccacagctgcaatgacagtttgggcctgcaaaaagaaggctggaacaacgggagatggaagctttctgcaaatgcagcaccactggtatccatgaatttaacctgcccatcattcttcctaaacaagagactattgaaaagtcagggtgagtagtttattaccatctcagtattaatccaatctctcagctggttctactgactcaggttcctaagaaagcaggggtgcctttctatcttgtatccagggc

SEQ ID NO: 8784 - DNA, 7464 bp, Homo sapiens
acagggcgcccggcgcgcctcggagcgcaagttcctcgccttctcctgcccgctcgctgggcattatgcggccaagcagccgagccccagtcctcctcctcctcctgctcctccggctcctcctgcggcccgagcggctcagctctcggcaggcggcggcgttgctcagccgagcgcagacgggaccctcgcagcgagacctcagcgactcctaaagtcaaaagttggcggcgggcgccgggctccgcgcgctctccacggccgctgcctcgcgtcgccgccgcagccaaggagggcaggagggaggggggtgggggcagcggagggaggggtgggaagcaccatgcagtttgtatcctgggccacactgctaacgctcctggtgcgggacctggccgagatggggagcccagacgccgcggcggccgtgcgcaaggacaggctgcacccgaggcaagtgaaattattagagaccctgagcgaatacgaaatcgtgtctcccatccgagtgaacgctctcggagaaccctttcccacgaacgtccacttcaaaagaacgcgacggagcattaactctgccactgacccctggcctgccttcgcctcctcctcttcctcctctacctcctcccaggcgcattaccgcctctctgccttcggccagcagtttctatttaatctcaccgccaatgccggatttatcgctccactgttcactgtcaccctcctcgggacgcccggggtgaatcagaccaagttttattccgaagaggaagcggaactcaagcactgtttctacaaaggctatgtcaataccaactccgagcacacggccgtcatcagcctctgctcaggaatgctgggcacattccggtctcatgatggggattattttattgaaccactacagtctatggatgaacaagaagatgaagaggaacaaaacaaaccccacatcatttataggcgcagcgccccccagagagagccctcaacaggaaggcatgcatgtgacacctcagaacacaaaaataggcacagtaaagacaagaagaaaaccagagcaagaaaatggggagaaaggattaacctggctggtgacgtagcagcattaaacagcggcttagcaacagaggcattttctgcttatggtaataagacggacaacacaagagaaaagaggacccacagaaggacaaaacgttttttatcctatccacggtttgtagaagtcttggtggtggcagacaacagaatggtttcataccatggagaaaaccttcaacactatattttaactttaatgtcaattgtagcctctatctataaagacccaagtattggaaatttaattaatattgttattgtgaacttaattgtgattcataatgaacaggatgggccttccatatcttttaatgctcagacaacattaaaaaacttttgccagtggcagcattcgaagaacagtccaggtggaatccatcatgatactgctgttctcttaacaagacaggatatctgcagagctcacgacaaatgtgataccttaggcctggctgaactgggaaccatttgtgatccctatagaagctgttctattagtgaagatagtggattgagtacagcttttacgatcgcccatgagctgggccatgtgtttaacatgcctcatgatgacaacaacaaatgtaaagaagaaggagttaagagtccccagcatgtcatggctccaacactgaacttctacaccaacccctggatgtggtcaaagtgtagtcgaaaatatatcactgagtttttagacactggttatggcgagtgtttgcttaacgaacctgaatccagaccctaccctttgcctgtccaactgccaggcatcctttacaacgtgaataaacaatgtgaattgatttttggaccaggttctcaggtgtgcccatatatgatgcagtgcagacggctctggtgcaataacgtcaatggagtacacaaaggctgccggactcagcacacaccctgggccgatgggacggagtgcgagcctggaaagcactgcaagtatggattttgtgttcccaaagaaatggatgtccccgtgacagatggatcctggggaagttggagtccctttggaacctgctccagaacatgtggagggggcatcaaaacagccattcgagagtgcaacagaccagaaccaaaaaatggtggaaaatactgtgtaggacgtagaatgaaatttaagtcctgcaacacggagccatgtctcaagcagaagcgagacttccgagatgaacagtgtgctcactttgacgggaagcattttaacatcaacggtctgcttcccaatgtgcgctgggtccctaaatacagtggaattctgatgaaggaccggtgcaagttgttctgcagagtggcagggaacacagcctactatcagcttcgagacagagtgatagatggaactccttgtggccaggacacaaatgatatctgtgtccagggcctttgccggcaagctggatgcgatcatgttttaaactcaaaagcccggagagataaatgtggggtttgtggtggcgataattcttcatgcaaaacagtggcaggaacatttaatacagtacattatggttacaatactgtggtccgaattccagctggtgctaccaatattgatgtgcggcagcacagtttctcaggggaaacagacgatgacaactacttagctttatcaagcagtaaaggtgaattcttgctaaatggaaactttgttgtcacaatggccaaaagggaaattcgcattgggaatgctgtggtagagtacagtgggtccgagactgccgtagaaagaattaactcaacagatcgcattgagcaagaacttttgcttcaggttttgtcggtgggaaagttgtacaaccccgatgtacgctattctttcaatattccaattgaagataaacctcagcagttttactggaacagtcatgggccatggcaagcatgcagtaaaccctgccaaggggaacggaaacgaaaacttgtttgcaccagggaatctgatcagcttactgtttctgatcaaagatgcgatcggctgccccagcctggacacattactgaaccctgtggtacagactgtgacctgaggtggcatgttgccagcaggagtgaatgtagtgcccagtgtggcttgggttaccgcacattggacatctactgtgccaaatatagcaggctggatgggaagactgagaaggttgatgatggtttttgcagcagccatcccaaaccaagcaaccgtgaaaaatgctcaggggaatgtaacacgggtggctggcgctattctgcctggactgaatgttcaaaaagctgtgacggtgggacccagaggagaagggctatttgtgtcaatacccgaaatgatgtactggatgacagcaaatgcacacatcaagagaaagttaccattcagaggtgcagtgagttcccttgtccacagtggaaatctggagactggtcagagtgcttggtcacctgtggaaaagggcataagcaccgccaggtctggtgtcagtttggtgaagatcgattaaatgatagaatgtgtgaccctgagaccaagccaacatctatgcagacttgtcagcagccggaatgtgcatcctggcaggcgggtccctggggacagtgcagtgtcacttgtggacagggataccagctaagagcagtgaaatgcatcattgggacttatatgtcagtggtagatgacaatgactgtaatgcagcaactagaccaactgatacccaggactgtgaattaccatcatgtcatcctcccccagctgccccggaaacgaggagaagcacatacagtgcaccaagaacccagtggcgatttgggtcttggaccccatgctcagccacttgtgggaaaggtacccggatgagatacgtcagctgccgagatgagaatggctctgtggctgacgagagtgcctgtgctaccctgcctagaccagtggcaaaggaagaatgttctgtgacaccctgtgggcaatggaaggccttggactggagctcttgctctgtgacctgtgggcaaggtagggcaacccggcaagtgatgtgtgtcaactacagtgaccacgtgatcgatcggagtgagtgtgaccaggattatatcccagaaactgaccaggactgttccatgtcaccatgccctcaaaggaccccagacagtggcttagctcagcaccccttccaaaatgaggactatcgtccccggagcgccagccccagccgcacccatgtgctcggtggaaaccagtggagaactggcccctggggagcatgttccagtacctgtgctggcggatcccagcggcgtgttgttgtatgtcaggatgaaaatggatacaccgcaaacgactgtgtggagagaataaaacctgatgagcaaagagcctgtgaatccggcccttgtcctcagtgggcttatggcaactggggagagtgcactaagctgtgtggtggaggcataagaacaagactggtggtctgtcagcggtccaacggtgaacggtttccagatttgagctgtgaaattcttgataaacctcccgatcgtgagcagtgtaacacacatgcttgtccacacgacgctgcatggagtactggcccttggagctcgtgttctgtctcttgtggtcgagggcataaacaacgaaatgtttactgcatggcaaaagatggaagccatttagaaagtgattactgtaagcacctggctaagccacatgggcacagaaagtgccgaggaggaagatgccccaaatggaaagctggcgcttggagtcagtgctctgtgtcctgtggccgaggcgtacagcagaggcatgtgggctgtcagatcggaacacacaaaatagccagagagaccgagtgcaacccatacaccagaccggagtcggaacgcgactgccaaggcccacggtgtcccctctacacttggagggcagaggaatggcaagaatgcaccaagacctgcggcgaaggctccaggtaccgcaaggtggtgtgtgtggatgacaacaaaaacgaggtgcatggggcacgctgtgacgtgagcaagcggccggtggaccgtgaaagctgtagtttgcaaccctgcgagtatgtctggatcacaggagaatggtcagagtgctcagtgacctgtggaaaaggctacaaacaaaggcttgtctcgtgcagcgagatttacaccgggaaggagaattatgaatacagctaccaaaccaccatcaactgcccaggcacgcagccccccagtgttcacccctgttacctgagggactgccctgtctcggccacctggagagttggcaactgggggagctgctcagtgtcttgtggtgttggagtgatgcagagatctgtgcaatgtttaaccaatgaggaccaacccagccacttatgccacactgatctgaagccagaagaacgaaaaacctgccgtaatgtctataactgtgagttaccccagaattgcaaggaggtaaaaagacttaaaggtgccagtgaagatggtgaatatttcctgatgattagaggaaagcttctgaagatattctgtgcggggatgcactctgaccaccccaaagagtacgtgacactggtgcatggagactctgagaatttctccgaggtttatgggcacaggttacacaacccaacagaatgtccctataacgggagccggcgcgatgactgccaatgtcggaaggattacacggccgctgggttttccagttttcagaaaatcagaatagacctgaccagcatgcagataatcaccactgacttacagtttgcaaggacaagcgaaggacatcccgtcccttttgccacagccggggattgctacagcgctgccaagtgcccacagggtcgttttagcatcaacctttatggaaccggcttgtctttaactgaatctgccagatggatatcacaagggaattatgctgtctctgacatcaagaagtcgccggatggtacccgagtcgtagggaaatgcggtggttactgtggaaaatgcactccatcctctggtactggcctggaggtgcgagttttatagctaaggtgctttgaagaggaagccattatggatggatgaaggatagtaatgcaatacctccaccttaatttgggtgcatgtgtatgtgtgtgtgtgtttgtgtgtgacttgtatgcttgtgtgtgtaaatgtgtgtacatatacatatatacatatctacacatacatatatacacatatatgtgtgtatgtagatatgtagactatcctaatgatgtaaagtttaatatttatgtttgaaattatttattgtgatgtaatatttttgtacgtaaaatgattctattatgactgcctttgcatgtagtaatatgacaaagtgatccttcattatcacggtacactattgtttacttttcatctgtaaatgttttattgttacttttttaaaatgaatttttttaaaacaatctagccatcatcaaggtgctataagagttgtataaaagatatttttggcatttctaggcaagtatcagccaataagtatgttagtgatatcacagattgtaccaactattaactatgttaaataagtattcagtttcatgtgatctctgggaaaaaaatatgctgccttggtgctaatattgtatgtatttaaatgatcatccgactcagaaatataaacacttttaatgaaagggaggaacggaaggacaatttccagtgcacagaatcacttggatgaaataagaccagctctttacccttatttttggatatgccttttttggaagagacttagactttatccttattgttgttagtgttgttaatattcgttgcttcagcccacggtgccttggtctctccacaatcaaatggaggatcccccaagcagcttcattacagagtgatattgggaaagtgagatcctctcaccattttgccaagatactctaaaatgacatccaagtttaccagtagaaagacacaggatgcacagaatgggcatgaccttcagctcacgagcacacctggagaaattcagaaccaggttctgaatcatcacgattgccttttgcatgaaaacatcggctggtgatgtgacttctcttcaggccatgagcctaacaccctgccggttttcatgcccgctgcagtaatggacgtttgtgtgaagaaatgaactgtggagtacaaaatgctttgagtctttccgattgctcattaattcacttttttgttacttctttccaaaatggaagtgctgaagccatggtctttctgcccctccaagctgatgaagggaagcctttgccaatggcccatggaagacacttggtttgagaaaccctgcccacttccaa

SEQ ID NO: 8785 - DNA, 776 bp, Homo sapiens; identical to SEQ ID NO: 8526

SEQ ID NO: 8786 - DNA, 1305 bp, Homo sapiens
gtcggtgccaggtcccaaagacgcagctgcgcgggtgtgccgggaggagccccggaatccacaggctgcgaggggaaggcgtttaacaactcgggggtgaagcctggtggacagcggcagggacatcataaatacagaagataattttaaagaagtgttccggccgggtgcagtggctcacaactgtaatcccaggactttgggaggctgaggcgggcagatcacctgagccagcacaggccagccagaagatgacactgagactacaggtttggaaggcggcgttgccatgccaggtgccgaagatgatgtggtgactccaggaaccagcgaagaccgctataagtctggcttgacaactctggtggcaacaagtgtcaacagtgtaacaggcattcgcatcgaggatctgccaacttcagaaagcacagtccacgcgcaagaacaaagtccaagcgccacagcctcaaacgtggccaccagtcactccacggagaaagtggatggagacacacagacaacagttgagaaagatggtttgtcaacagtgaccctggttggaatcatagttggggtcttactagccatcggcttcattggtgcaatcatcgttgtggttatgcgaaaaatgtcgggaaggtactcgccctaaagagctgaagggttacgccctgctgccaacgtgcttaaaaaaagaccgtttctgactctgtgccctgtccctgagctcgtgggagaagatgacccgtggaacacttgcctggcccactcagaatccacggtgacctctccgcttgccaaaataaccgaaggaaagaccgttcaccagacttggctcctctaaacatttgctgttcaaacatgtttttgaatatacattctataaaagattatttgaaagacaaaattcatagaaaatggagcaaaactgtataaactgatttgtaactaacactggaccattggatcgatattatatgctgtaaccatgtgtctccgtctgaccattcttgttattgttaaaatgcagaggaatctggaaatatttatatccacggagtccttggatccagtgctacgtcagtaaatagcaccagcattttgcaattgctgatctgctgaaatgtacacattctggtctagtttggtctatcttttaaagcctgatctggtgtgaataatcaactaggaaatctaaacttggataacacgtggtgaacaactgcctttagctggtccagattaatcatttcaaagacatccattttagatcacaagcaggaagtcgatagtctcaaaggcact

SEQ ID NO: 8787 - DNA, 606 bp, Homo sapiens
cttgaaaaggagaagaaagtttcttcctcaagtgatttataacttgaaacatgctgtcatgttttgcctctgcaatcccagataatggaagaaggtcctgtctaaagctcaaagtctttgtgagaccaacaaatagctgtatgaaaactataggtgttcatgatcgtgttttcgatgttaacgacaaagtagaaaattcattagaaccagcagatgacaccgtacatgagtcagccgagccatcccgcggcgagaacgcggcacaaacaccaaggatacccagccgccttttggcaatcctactgttcctcctggcgatgcttttgacattatagcacagtctcctcccatcacttgtcacagaaaacatcagggtcttggaacaccagagatccacctaactgctcatcctaagaagggacttgttattgggttttggcagatgtcagatttttgttttctttctttcagcctgaattctaagcaacaacttcaggttgggggcctaaacttgttcctgcctccctcaccccaccccgccccacccccagccctggcccttggcttctctcacccctcccaaattaaatggactccagatgaaaa

SEQ ID NO: 8788 - DNA, 425 bp, Homo sapiens
tttcaagctcagataaatgcagcctcactggaaaaggtcaaacagtacaaccagaagctcagggcattctacttggacaagtcaaattcaccaccaaactccacatccaaagctgcctatgtagataagctaatgaggcctctcaacgctttggatgaactttaccgactggtagcctcgtttatcagatccaagcgcacagctgcctgtgcaaacacagcttgcagtgcttctggggttggactgctgtcagtttcctcggagctgtgcaacaggctgggcgcctgccacatcatcatgtgcagcagcggtgtgcatcggtatgtgaccctcccgccttgcttgcctctttgttagatcacactttatttgatggtttttgtttacattttggcttcacaaaattaaaactggaaacattcaaa

SEQ ID NO: 8789 - DNA, 1702 bp, Homo sapiens
aaaataataaacactgctggaaccagtaatgcagaagtccccttggctgatcccggaatgtaccagctggacattacattaagaaggggtcaaagtttagctgctcgagatcgaggagggacgagtgatccatatgtgaagtttaaaatcggaggaaaagaagtttttagaagtaagataatacacaagaacctcaaccctgtgtgggaagaaaaagcttgtattctggttgatcatcttagggagccattgtatataaaggtatttgactatgattttggactacaggatgactttatgggctcagcctttctggatctgacacaattggagttaaacaggcccacagatgtgacccttactctgaaagatcctcattatcctgaccatgatcttggaatcattttgctctcagtcatccttacccctaaagaaggagagtccagggatgtgacaatgctaatgaggaagagttggaaaagatcaagtaaggtaattcttagcttgtgatctttcagcttttcttgttgagcagaactatcatctgctttcccagatctctctcatctcttcaaagtatgctaccagatttcatactattcaattgttacttttccccataaatttaagccaaccatgtgatgttttttaaatagaaatcacaccgatcaatagcttcaaatcatcctttcactattctctggtcacttctcaacatcattctcagcatctggtctcaactatatatgcaacagggtctagaaaattgctctgagccaggaataaaatgatgaggctaggggagggacaactccagacagaagaaagattcgcacaatttattttattttggggggtcacagaaaattgagtatgaggctttctaaactcagaaattcctgtatcattacatctttatagtatacaataagaacaatttttccccattgtctcttctcactttaagaaataaagtgagaggagtttatggttcctgtaacttactaagccctggctcttcttcaacttgtaagatatgcaaaatataaactaagtgtttaatttgttcagtgatgctgccactgttggacacagatcgatatcaagatgaaacaatttttatatgaatataccttgaaataaatcaaaacgattttacttgtaaaaatcttgtctgctcaaatttctacttagagtcagtattcctttttaataatgactaatttttttagaccctggaacatgacagtctttttccttccattctgattgaatcatgcttttacctaagcttttctttaattttgtcatttttattactgtgaattaatatatatcaaaatgtttttatatttatggtaatgacttaatctgtttgaacaagtgtctcttactgtacattttctccctaattcctatggcattaatggcattaatgaccaaagaataatttggcttacaaaaaagtcagggctcccattaaaaatcacctttattattttaataaaatgaaaaaggcttattaaggaaggttgctgaatatttctaacttaatgttcactgtgattttcactaatcaaaataaagtttcaagatgttttgaagaaatatttgcactgttcatatttgtattactttttcctttacagttatactttacagttattgttatattaaaagtgtatatatttttaaattcata

SEQ ID NO: 8790 - DNA, 566 bp, Homo sapiens
ctttgtctctagctgctgcgggagctccaggtctagtctttactgctctgtgtattctgctcctagaggcccagcctctgtgactccgttatctgcaggtattgggagatgcacagctaagatgccaggaccacctggaagcctagaaatggactgcctgaggtacaaagtgtagcctctcgagggagcaggtggatgccctggagctgagagaaatctcctggtgcactcttccttggaaaggctgacaccttgagacattaagattgtcttcacccaactcagcttccgtttccttgggacacattgctggtcaatcagatgctggtattgagggaaaaacatagaaataatttctggattctctaagggggcagaaaaatagtgaaaaaaaatgatgaaaaaagagtgaaagacaaatagtgaaaaatttgtaaaggaaattaaaaggtaaaatatttacgaatggtgtaaaagagggaccactgacatttagggatgtggccatagaattctctctggaggagtggcaatgcctggacactgcacaacggaatttatatagg

SEQ ID NO: 8791 - DNA, 897 bp, Homo sapiens
gtccagctgccatcttttctctctctaacgcatacaatggaaaagcctttgccagatcgggtagccccagggctggggctgccagaagtttttcctttaactcctgaaagactttctgttcttgggatccccattccaaaggttcccggtccccgccccctttgtgacctcatacaaaggcttggctaacactgcaaagtttgggatgcacagtctataaaaccccacagcccctgagaattccctcacctgccttctgcccttaggctccggtagattgcaaatgacctgctttctttctgttcccgggctgcgttcggacccctgtcggatagtaactcccaagtaaggtacctgccgtcggcagattggagctttcttcttggagacctaatacccacagtcctccaggctccggtagattgcaaatgacctgctttctttctgttcccgggctgcgttcggacccctgtcggagagtaaatccgaaaaaaacaaacaaagacatggatttactgtgcatattagcagatccatactggaaaatgcatggaggtttcatatacaccacttacagttttcagctcctcagtagtgacaaagccatacccatcattgtcgattcgatcaacaatcttccctagcctctccttgctctcgtccggggtgagctcgtcgaagttcttggagtcctccttgcccaggaaggcctcgtggtcgtactggaagctctggttgtcctcagggggccgctcgcccagctccgagtcgggccgcaccacgcgctctttgcgcaccgtgggcttggcccgcagaacccgcggcgccagcaccagcgccagcagcagccccagggctaaccccaggcggccaccgcgcgccatcgtcccgaggaga

SEQ ID NO: 8792 - DNA, 565 bp, Homo sapiens
ttttatttgcagctcggagcctgtggcggatggtgggactctccggccctgtgcagtaaaagattgatctctgggctggtgaacataatctctgtcccagtcagaaaaggagagaggaaattagcagagcgattggtggagaatgatatctgtcaaaagaaacacttggagagcactgagtttagtaataggtgactgccggaaaaaagggaactttgaatattgtcaaggcgcacgcgcccagcaccctgcctccggcgatgccgccccagcccctctgatggccctcctctctgctgccactcattccagaacaggaggcatgagcccggaacgcgcttgcttttaggagacagccactttctgtgtggtacgctggattcaaggatgcctgatcgtactgagaagcactccacaatgccagactcacctgtggatgtgaagacgcaatctaggctgactcctccaacaatgccacctcccccaactactcaaggagctccaagaaccagttcatttacaccgacaacgttaactaatggcacgagccattctcctacagcct

SEQ ID NO: 8793 - DNA, 933 bp, Homo sapiens; identical to SEQ ID NO: 2272
